United States Patent Application Publication US 2009/0100536 A1 - sequence listing, part 6

SEQ ID NO: 22509 - protein, 1179 aa, Arabidopsis thaliana
MSSFRVGGKVVEKVDLCRKKQLVWRLDVWPFAILYTVWLTTIVPSIDFSDACIALGGLSAFHILVLLFTTWSVDFKCFVQFSKVNSIDQADACKVTPAKFSGSKEVVPLHFRSQMTDSASSGDMEEIFFDFRKQRFIYSKELGAFSKLPYPTKETFGHYLKCTGHGTEAKIATATEKWGRNVFDYPQPTFQKLMKENCMEPFFVFQVFCVGLWCLDEFWYYSVFTLFMLFMFESTMAKSRLKTLTDLRSVRVDSQTVMVYRSGKWVKLLGTDLLPGDVVSIGRPSTQTGGEDKTVPADMLLLVGSAIVNEAILTGESTPQWKVPIVGQRSDEKLSIKRNKNHVLFGGTKILQHSPDKSFSLKTPDGGCLAVVLRTGFETSQGKLMRTILFSTERVTANSWESGLFILFLVVFAVIAAGYVLVKGLEDPTRSKYKLLLGCSLIITSVIPPELPMELSIAVNTSLLALVRRGIFCTEPFRIPFAGKVDLCCFDKTGTLTSDDMEFRGVGGLSNCEEAETDMSKVPVRTLEILASCHALVFVENKLVGDPLEKAALKGIDWSYKADEKALPRRGNGNSVQIMQRYHFASHLKRMSVIVRIQEEYLAFVKGAPETIQERLVDVPAQYIETYKRYTRQGSRVLALAYKRLPDMMVSEARDMDRDAVESDLTFAGFAVFNCPIRPDSAPVLLELKNSSHDLVMITGDQALTACHVAGQVHIVSNPVLILGRSGSGNEYKWVSPDEKEIIPYSEKEIETLAETHDLCIGGDSIEMLQATSAVLRVIPFVKVFARVAPQQKELILTTFKAVGRGTLMCGDGTNDVGALKQAHVGVALLNNKLPLSPSDSSKDDKSKSKKSKLPLEPASKTITQNGEGSSKGKIPPQNRHLTAAELQRQKLKKIMDDLNNDEGDGRSAPLVKLGDASMASPFTAKHASVAPVTDIIRQGRSTLVTTLQMFKILGLNCLATAYVLSVMYLDGVKLGDVQATISGVLTAAFFLFISHARPLQTLSAERPHPSVFSVYLFLSLIGQFAVHLTFLVYSVKEAEKHMPEECIEPDASFHPNLVNTVSYMVSMMLQVATFAVNYMGHPFNQSIRENKPFFYALIAGAGFFTVIASDLFRDLNDSLKLVPLPQGLRDKLLIWASLMFIICYSWERLLRWAFPGKISSWKHKQRAVTANLEKKKKV

SEQ ID NO: 22510 - protein, 254 aa, Glycine max
  unsure (1)..(254): unsure at all Xaa locations
XARGCSKWVKLSGIDLLPGDVVSIGRSSGQNGEEKSVPADMLLLAGSVIVNEAXILTGESTTQWEISIAGRAMEETLSAKRDKNHVLFGGTKILQHTPDKSFPLKTPDGGCLAVILRTGFETSQGKLMRTILFSTERVTANSWESGFFILFLVVFALIAAGYVLVKGLEDPTRSKYKLILSCSLIVTSVIPPELPMELSIAVNTSLIALARRGIFCTEPFRIPFAGKVDICCFDKTGTLTSDDMDFPGIVGLNG

SEQ ID NO: 22511 - protein, 229 aa, Glycine max
  unsure (1)..(229): unsure at all Xaa locations
MSSFHVGGKVVDQVDLLRKKRWPWRLDVWPFAILYGAWLSTILPSLDFVDAAIVFGALVSLHILVFLFTGWSVDFKCFAHYSKVKNIDQADSCKITPAKFSGSKEVVPLHSRKSSAASSSAVDLEENYFDFRKQCFVHSKEKGTFCKLSYPTKETFGYYLKCSGHGSEAKVLAATEKWGRNVFDYPQPTFQKLMKEHCMEPFFVFQVFCVGLWCLDEYWYYSLFTLFMX

SEQ ID NO: 22512 - protein, 119 aa, Glycine max
  unsure (1)..(119): unsure at all Xaa locations
XSDDMELSGIVGLNGTTYMESDTSKVPLRTVEILAFCHALLLVENKLCGDPLEKAELNGIDWSYKSDARTLAKEVYGHPVQIAHRCHFGFYFXRXMKLSIAHHEEYSLFDKGAPXVVHX

SEQ ID NO: 22513 - protein, 1208 aa, Dictyostelium discoideum
KEDENQVEFNLHVFLICSSMALHFGWYLFNLGSIDYKCFVTMKKVDNIKCATHAKVTPGKHMGMKQLCPISRHLHRAPSSISSASSTSVNIVGNGSNVGKISTKHLSEKEFKDLQYSIEFQKRKLVYNPDKKQFEKIKFHIPLDSEELLNQARSYETDEQIELAAMKYGLNRFDIPIPTFLALYKEQAIAPFFVFQVFCVLLWCLEEYVFYCLFSLFMLLVFEATVVKSRLSNLNSLRNMSSKPTFPIYVYRLNQWKQINTTEILPGDIVSIGRGASEATSTLPCDMILLSGGCVVNEAMLTGESTPHHKESIKDRKSTKPLDLKNEKIHILYGGTTIVQHTPSEKLARVSKPPDRGCIAYAYKTGFNTNQGRLMRTIWFSSERVTANNKESFLFILFLLTFAIAASAYLFNKGIRENNRSKYKLLLNCIMVITSVVPPELPMELSLAVNNSLISLIKLGIYCTEPFRIPFAGKVDVCCFDKTGTLTTDDLVLQGIANCPKKYITANNDHEDVDIDSTTTDTTTTNTTTTTTTTTSTTKEEQESSLTSTTFVQPSELADVIQFILAGCHSLVLIDNKLVGDPMEMAGLKSIPFTCKADKISHQKKPINIEIVHRYHFSSELKRMTTICNVVYTKNLQCNTYAFSKGAPEIMKPFFNDKSLPDNYDQCFKSYSRQGSRVLALGYKRFESGLNVSQYKSMERDSVESNLEFGGFIIFDCPLKPDSKESIEMLMNSSHRIVMITGDNSLTACHVGKQLGFVQENKQTIILQKIKNSNNNNNNEKNEEKEENNNNDNDNNNLGEWVSVDESIIIPLENGNENHLNQLDKDYNLCIGGNSLDLVIGDKNLEKDLYLVKVFARVSPEQKQMILTNFKVNGHYTLMAGDGTNDVGALKQAHVGIAILNKGEFKPPPEINLREIFNQAKQRQMQEQLRRNGDPRAAAELAQKQAADLAQRMQQDNEVQMVKLGDASIAAPFTSKSSAVKPITHIIRQGRCTLVTTFQMYKILALNSLITAYGLSVLYLDGVKLGDTQATISGMLIAVCFLFISTSKPLMKLANKRPNPNLFSPYMMCSILLQFALHLVCIIFIVHQSQLRIGTNRPDPDSPFAPNLLNSAVFLMSNAMQVATFAVNYKGHPFMQSLSENKPLLYALSFVWGLGLLLATEIIPPLNSMLELVEFPDSTFRLYMVGAIILDLVGAWFIEKVCSVLLKN

SEQ ID NO: 22514 - protein, 1175 aa, Oryza sativa
  unsure (1)..(1175): unsure at all Xaa locations
MARFEVGGKSVEGVDLLRRRHWASRLDFWPFLALYALWLVVVVPALDFTDALVVLGALSASHXLAFLFTAWSVDFRAFVGYSKVKDIRAANSCKVTPAKFSGSKEIVPLHIQKTVTSSSAAGETEEIYFDFRKQRFIYSSQEDNFFKLRYPTKEPFEHYIKGTGYGTEAKINTAVDKWGRNIFEYPQPTFQKLMKEQCMEPFFVFQVFCVGLWCLDEYWYYSLFTLFMLFLFESTMAKNRLKTLTELRRVKVDNQIVATYRCGKWVRIPGTELLPGDIVSIGRSVSGEDRSVPADMLLLAGSAIVNEAILTGESTPQWKVPLAGRGPEETLSVKRDKNHILFGGTKILQHTPDKSINLRAPDGGCIAFVLRTGFETSQGKLMRTILFSTERVTANSKESGLFILFLLFFAVIASGYVLVKGLEDPTRSRYKLFLSCSLILTSVIPPELPMELSIAVNTSLIALARRGIFCTEPFRIPFAGKVDICCFDKTGTLTSDDMEFQGVVSLEDDEELITDANKLPLRTQEVLSSCHALVFVDNKLVGDPLEKAAIKGIDWIYTSDEKAISKKSGGQPVKIVHRYHFASHLKRMSVVVSIHEKYYAFIKGAPETIQERLVDLPAGYVETYKKYTRQGSRVLALAYKLLPDMPVNEARSLERDQVESDLTFAGFAVFNCPIRSDSGAVLQELEQSSHDLVMITGDQALTACHVAGQVHICSKPVLILTRTKTGGFEWVSPDETDRAPYSAEEVAAVSGSHDLCISGDCFEMLQRTDAVIQVIPYVKVFARVAPEQKELVLTTFKTVGRVTLMCGDGTNDVGALKQAHVGIALLNAEPVQKSDTKSQASKSENKQGKLKKPKPSRSSSQLTQPANSSARASSSRPLTAAERQRERLQKMMDEMNEESDGRSAPIVKLGDASMASPFTAKHASVAPTLDIIRQGRSTLVTTLQMFKILGLNCLATAYVLSVMYLDGVKLGDVQATISGVFTAAFFLFISHARPLQTLSAERPHPNIFCAYVFLSILGQFAMHLFFLISAVNEATKYMPEECIEPDSEFHPNLVNTVSYMVNMMIQVATFAVNYMGHPFNQSITENKPFKYALYAAVAFFTVITSDMFRDLNDYMKLEPLPEGMRGKLMLWAILMFCGCYGWERILRWAFPGKMPAWEKRQKQAIANREKKHEXD

SEQ ID NO: 22515 - protein, 1211 aa, Schizosaccharomyces pombe
MGSKALITSPDISSGQLYIKLPTFFHLYVWPFALFVYPYIGYVYQNKLYSEEVRYLTYIAVGTIHALFWLAGEWNTKVYCLMTCRKTDKVEQATHILVTPSKIGESSSVEPITKLVLPDSQTIQYSFSFQRKRFIYEPEKGCFANITFPMDEPSTIGTLKKSTGLTNIQSEIFLYRYGKNCFDIPIPTFGTLFKEHAVAPFFVFQIFCCVLWCLDDYWYFSLFSMFMIIALECSVVWQRQRTLTEFRTMSIKPYEIQVYRNKHWFPISTEDLLPNDVVSVLHNKEDSGLPCDLLLLSGSCVVNEAMLSGESTPLVKESIELRPEEAVIDVDELDKNAVLFGGTRVLQVTQSPFCKLKTPDNGVPAIVLRTGFETSQGSLVRTMVFSSEKVTANNRESLYFILFLLVFAIAASGYVWHVGSKTERSRYKLMLDCVMIITSVVPSELPMELSMAVNASLGALSKYYIYCTEPFRIPLSGHLDICCFDKTGTLTEEHMVVQGIAGVNRKDPYSLEKLSDASNDAILAIATAHTLVLLEQEGETPKVVGDPMEKATVENLGWSIEKKNFVSAPEGSVFYKGKVQIIRNFQFSSALKRQSSVSNVRVSGGSFKTFVSVKGAPEVIATMLREVPKDYEKIYKDYGRKGSRVLALGYKYFKNYIPENQVSDLSRESIESDLVFAGFLIFTSPLKEDARQTVQMLNNSSHRCMMITGDNPLTAVYVAEQVGIVEKPTLVLDIKHENEKILEWKSTDDTINLPMNPHKSLEASLYEKYDLCITGRALSQIINPDVIMSIFTHAWVYARVSPSQKEFMISTLKHNGYITLMCGDGTNDVGALKQAHVGVALLNASEEDMLEMQERARNQKLMGVYEKQIQLAKRFNLPTPPVPPALCHAFPPGPNNPHREKTQEGLNKVLEDLETKKASDVQLTEAEKAAERRANLANKMFDTLANASDDEAPKLKLGDASVAAPFTSKLAVVSSITNIVRQGRCTLVALVQMHKILALNCLITAYSLSVLHLDGIKFGDTQYTISGMLMSVCFYCVSRARPLETLSKERPQAGIFNTYIIGSVLGQFAIHIVTLIYITRVVYLYEDPLEKVDLEETFKPSLLNTAIYLLQLIQQVSTFAINYQGRPFREALSENKGMYYGLLGIAFVAIAGVTEFSPELNAKLQLVKMAYNFQIQLLATMVVDYAACWIIEELMKKYFRDNKPKEIVLRN

SEQ ID NO: 22516 - protein, 1211 aa, Schizosaccharomyces pombe
MGSKALITSPDISSGQLYIKLPTFFHLYVWPFALFVYPYIGYVYQNKLYSEEVRYLTYIAVGTIHALFWLAGEWNTKVYCLMTCRKTDKVEQATHILVTPSKIGESSSVEPITKLVLPDSQTIQYSFSFQRKRFIYEPEKGCFANITFPMDEPSTIGTLKKSTGLTNIQSEIFLYRYGKNCFDIPIPTFGTLFKEHAVAPFFVFQIFCCVLWCLDDYWYFSLFSMFMIIALECSVWWQRQRTLTEFRTMSIKPYEIQVYRNKHWFPISTEDLLPNDVVSVLHNKEDSGLPCDLLLLSGSCVVNEAMLSGESTPLVKESIELRPEEAVIDVDELDKNAVLFGGTRVLQVTQSPFCKLKTPDNGVPAIVLRTGFETSQGSLVRTMVFSSEKVTANNRESLYFILFLLVFAIAASGYVWHVGSKTERSRYKLMLDCVMIITSVVPSELPMELSMAVNASLGALSKYYIYCTEPFRIPLSGHLDICCFDKTGTLTEEHMVVQGIAGVNRKDPYSLEKLSDASNDAILAIATAHTLVLLEQEGETPKVVGDPMEKATVENLGWSIEKKNFVSAPEGSVFYKGKVQIIRNFQFSSALKRQSSVSNVRVSGGSFKTFVSVKGAPEVIATMLREVPKDYEKIYKDYGRKGSRVLALGYKYFKNYIPENQVSDLSRESIESDLVFAGFLIFTSPLKEDARQTVQMLNNSSHRCMMITGDNPLTAVYVAEQVGIVEKPTLVLDIKHENEKILEWKSTDDTINLPMNPHKSLEASLYEKYDLCITGRALSQIINPDVIMSIFTHAWVYARVSPSQKEFMISTLKHNGYITLMCGDGTNDVGALKQAHVGVALLNASEEDMLEMQERARNQKLMGVYEKQIQLAKRFNLPTPPVPPALCHAFPPGPNNPHREKTQEGLNKVLEDLETKKASDVQLTEAEKAAERRANLANKMFDTLANASDDEAPKLKLGDASVAAPFTSKLAVVSSITNIVRQGRCTLVALVQMHKILALNCLITAYSLSVLHLDGIKFGDTQYTISGMLMSVCFYCVSRARPLETLSKERPQAGIFNTYIIGSVLGQFAIHIVTLIYITRVVYLYEDPLEKVDLEETFKPSLLNTAIYLLQLIQQVSTFAINYQGRPFREALSENKGMYYGLLGIAFVAIAGVTEFSPELNAKLQLVKMAYNFQIQLLATMVVDYAACWIIEELMKKYFRDNKPKEIVLRN

SEQ ID NO: 22517 - protein, 1315 aa, Schizosaccharomyces pombe
MASPKMIRSKRSTSSIASKNSLNSYLASSLMSHDSIFDGPGLGTSIPSSVSSFHHQTLRPSSDASVSQFSMDYLQSEYNLNRYNDGESIAASRDYQSLLRDNGSGVYSDEEEITEMMLEELNIHPVLRRESVGEAAGLSEDGCCQILYLVEEDLEVGIAGYKTNKSRYRLYQAICLLTLGLAYLIFRWLPKYFIRFVGTREPLATADWLTIETQWGELSKLDIQIQPYENSLSSIFGASIRVAAPEGTENDPFIENFRYVNYRYMKLIFHPLLDRFLIQQDWKDPRWIRDTSVVKEGLERDAINDRLCIFGENLIDLELKSVSQLLIDEVLHPFYIFQVFSIILWSMDSYYYYAICILIISVVSILGSLIETRKTLRRMREMSRFTCPVRVYRDGFWTSISSTDLVIGDVFEISDPELTIFPADALLLSGDCIVNESMLTGESIPVSKIPATDQSMKELFSFSKNIPASLCKHFLFSGTKIIQVRKPFVNEKEEGASLAMVVRTGFNTTKGALVRSMIFPKPTNFSFYRDSFRFITAMFIIALIGFVFSSINLLTLGVPIATIIIRALDLITIVVPPALPATLTIGTTFAISRLRKQGIFCISPQRVNVSGKLDLISFDKTGTLTEDGLDIMGVSVIEGSELGDLRSNSGNLCSKDLLSNDSPSNLLYTMATCHMLRYVDGELVGDPLDIKMFKFTHWSYSEENFLNKKMSSEQAEDAAYVRTQQLIPPTVSPPWNSPSNNYTESDLELGIVRTFEFVSQLRRMAVIVKHGKFKKMDAYVKGAPEIMPSICKPESFPANYQEVLDYYTHNGFRVIACASKQLENCTWAKAQRMKREQVECDLDFCGFIVFENKLKSTTATVIRELNDARIRTVMCTGDNVLTSICVGKRCGMLPEDGYVFLPRFDEESESADEASRQLVWQAIENNEIFLDPHTLRPNVDFADHEPVSIELARLKDFHIALTGDVFRWLVDYAPLNVFHHILLKAQIFARMSPSEKNELVSCFQNLNYCVGFCGDGANDCGALKAADVGISLSEAEASVAAPFTSKWFEITCVLDVIKDGRAALVTSFSCFQYMALYSAIQFITVSILYTTNSNLGDFQFLFIDLVIILPIAVFMGRSRPYHRLAHKRPTANLVSKRILSPLIGQIVLICIIQYITLRIVRREPWYIPPPANSSDTNITNSDVTALFLISCFQYIFIGVVLSIGPPYREKVWRNYSFTAVVVVLLILTVKLIRLQNHKNFFMKLFQLTPTSKSFQNFLIFAGVIYYLLAASGQNYIFISMTNFISHLNNRLLNRRTKVSKKLYKRLFADLQNEQV

SEQ ID NO: 22518 - protein, 1096 aa, Schizosaccharomyces pombe
MDSIELKQLVPENDSEPGTPRQLLFQHYDISNEETIGIKPFKSIPAKVYILRVTEILTLGLLHLILTWLPEFRLKWIEAPCSNEDVEFVAISDPSGTSSIEKVSSICLKNDIQTSSFVLPSGKTRYFEYKKLRFYLEPLNLQWVLMPLETSAYSLVTSTPAYIQNGLDTFTIAKLRQVYGSNSLVSTKKSIVTILLNEVLHPFYLFQAVSVLIWLCDSFVFYSCCIVFISSYSIFLSVKESKESENRIHSIIGAPQPVTVIRNQVKQTVLADDLVIGDLLYFSNLDLKTCPVDGILFSSSCLLDESMVTGESVPARKFPLEDNSLDSWMIASCNIFSPHLIHAGTKFLKIDSTPSTPCLISVVRTGFRSNKGQLIRNLLYPNLRPSQLYLDSMSFLKTMAILSFVSIVFIAIYLNLYNASFGHVVLRSLDVLTILVPPALPATLSVGIANSIARLSRALIYTTSPESIHNAGCLSTFVFDKTGTLTENSVQLSCVYVKSGSNGLLKQVDADSLSLDSTKLNAHAYRVATCSQSLELVGNELVGDPLEVTLFTQFNGTFCATIRASNTPHPPLFSVSNSFDGPSQIFSIYKALEFDPVLRRMSVICSTSTERSLMLFTKGAPESILAISSQQSIPSNVQEVIHTLSSKGFRIIAFASKNLITPLQELIHLSRSTLESNVTFQGLFVLESPLRESSKDVISSLLRSKMEVSICSGDSLFTSVFVAKHCGALDSCNFIYTAELADSGDDCPQIHFEKIDLQTQNFQPIPDGFSLKDVILEKDSSLCMDGKLLQRLLTMLSFNEIKILLSKLRVLARMSPFDKATYVELCQKYGCKVGFCGDGANDCIALKQADVGVSLSDSEACAAASFVSKKKSIKDVFNVLLEGRCSLILSHRCFQYMVLCAIVQFSGVFFLYLKNYNFNDNQFLFMDLLIIFPLSAAMSYFDPAQNLTSNRPNSTLFGKGRVKDLGIQSVLIWLSHGLLTLILHELNWVELPEWQLEKSNTKNVLVTSIFLLSSLQYLGICIGINQSSEFLSPIWKKKTYVCLCTTIGLCNIYLCFANENHIISRCLQITRLPTLYRFIILFMGVISCCLTSILNM

SEQ ID NO: 22519 - protein, 1215 aa, Saccharomyces cerevisiae
MTKKSFVSSPIVRDSTLLVPKSLIAKPYVLPFFPLYATFAQLYFQQYDRYIKGPEWTFVYLGTLVSLNILVMLMPAWNVKIKAKFNYSTTKNVNEATHILIYTTPNNGSDGIVEIQRVTEAGSLQTFFQFQKKRFLWHENEQVFSSPKFLVDESPKIGDFQKCKGHSGDLTHLKRLYGENSFDIPIPTFMELFKEHAVAPLFVFQVFCVALWLLDEFWYYSLFNLFMIISMEAAAVFQRLTALKEFRTMGIKPYTINVFRNKKWVALQTNELLPMDLVSITRTAEESAIPCDLILLDGSAIVNEAMLSGESTPLLKESIKLRPSEDNLQLDGVDKIAVLHGGTKALQVTPPEHKSDIPPPPDGGALAIVTKTGFETSQGSLVRVMIYSAERVSVDNKEALMFILFLLIFAVIASWYVWVEGTKMGRIQSKLILDCILIITSVVPPELPMELTMAVNSSLAALAKFYVYCTEPFRIPFAGRIDVCCFDKTGTLTGEDLVFEGLAGISADSENIRHLYSAAEAPESTILVIGAAHALVKLEDGDIVGDPMEKATLKAVGWAVERKNSNYREGTGKLDIIRRFQFSSALKRSASIASHNDALFAAVKGAPETIRERLSDIPKNYDEIYKSFTRSGSRVLALASKSLPKMSQSKIDDLNRDDVESELTFNGFLIFHCPLKDDAIETIKMLNESSHRSIMITGDNPLTAVHVAKEVGIVFGETLILDRAGKSDDNQLLFRDVEETVSIPFDPSKDTFDHSKLFDRYDIAVTGYALNALEGHSQLRDLLRHTWVYARVSPSQKEFLLNTLKDMGYQTLMCGDGTNDVGALKQAHVGIALLNGTEEGLKKLGEQRRLEGMKMMYIKQTEFMARWNQPQPPVPEPIAHLFPPGPKNPHYLKALESKGTVITPEIRKAVEEANSKPVEVIKPNGLSEKKPADLASLLLNSAGDAQGDEAPALKLGDASCAAPFTSKLANVSAVTNIIRQGRCALVNTIQMYKILALNCLISAYSLSIIYMAGVKFGDGQATVSGLLLSVCFLSISRGKPLEKLSKQRPQSGIFNVYIMGSILSQFAVHIATLVYITTEIYKLEPREPQVDLEKEFAPSLLNTGIFIIQLVQQVSTFAVNYQGEPFRENIRSNKGMYYGLLGVTGLALASATEFLPELNEAMKFVPMTDDFKIKLTLTLLLDFFGSWGVEHFFKFFFMDDKPSDISVQQVKIASK

SEQ ID NO: 22520 - protein, 1472 aa, Saccharomyces cerevisiae
MDIPSSNQIQHGQRSERNRRMPRASFSSTATTSTAATLTSAMVLDQNNSEPYAGATFEAVPSSIVSFHHPHSFQSSNLPSPHSSGNLEQRGRRLTESEPLVLSSAEQSRSSSRNPSHFRFFTQEQISNAEGASTLENTDYDMAWDATPAYEQDRIYGTGLSSRRSSIRSFSRASSLSNAKSYGSFSKRGRSGSRAPQRLGENSDTGFVYHSATHSSSSLSRYTTRERIPIELESQTDEILEDESSTHSLESSDSRRSASENNRGSFSGHDDVHNQHSEYLKPDYHEKFYPQYAPNLHYQRFYIAEEDLVIGIAAYQTSKFWYIIYNLCCFLTFGLVYLLTRWLPHLKVKLYGVKVPLAKAEWVVIENEFGEFVIQPIDRQWYNRPLSTVLPFENYPNPSYEPNDINLSHHHANEINPNVPILITFEYRYIKFIYSPLDDLFKTNNNWIDPDWVDLSTVSNGLTKGVQEDRELAFGKNQINLRMKTTSEILFNEVLHPFYVFQVFSIILWGIDEYYYYAACIFLISVLSIFDSLNEQKKVSRNLAEMSHFHCDVRVLRDKFWTTISSSELVPGDIYEVSDPNITILPCDSILLSSDCIVNESMLTGESVPVSKFPATEETMYQLCDDFQSTQISSFVSKSFLYNGTNIIRARIAPGQTAALAMVVRTGFSTTKGSLVRSMVFPKPTGFKFYRDSFKYIGFMSLIAIFGFCVSCVQFIKLGLDKKTMILRALDIITIVVPPALPATLTIGTNFALSRLKEKGIFCISPTRLNISGKIDVMCFDKTGTLTEDGLDVLGVQISEPNGVRGQKFGELLSDIRQVFPKFSLNDCSSPLDFKSRNFFMSLLTCHSLRSVDGNLLGDPLDFKMFQFTGWSFEEDFQKRAFHSLYEGRHEDDVFPENSEIIPAVVHPDSNNRENTFTDNDPHNFLGVVRSFEFLSELRRMSVIVKTNNDDVYWSFTKGAPEVISEICNKSTLPADFEEVLRCYTHNGYRVIACAGKTLPKRTWLYSQKVSREEVESNLEFLGFIIFQNKLKKETSETLKSLQDANIRTIMCTGDNILTAISVGREAGLIQCSRVYVPSINDTPLHGEPVIVWRDVNEPDKILDTKTLKPVKLGNNSVESLRECNYTLAVSGDVFRLLFRDENEIPEEYLNEILLNSSIYARMSPDEKHELMIQLQKLDYTVGFCGDGANDCGALKAADVGISLSEAEASVAAPFTSKIFNISCVLDVIREGRAALVTSFACFQYMSLYSAIQFITITILYSRGSNLGDFQFLYIDLLLIVPIAICMSWSKSYEKIDKKRPSANLVSPKILVPLLISVFLVFLFQFIPWIIVQKMSWYIKPIVGGDDAVQSSDNTVLFFVSNFQYILTAIVLSVGPPYREPMSKNFEFIVDITVSIGASLLLMTLDTESYLGKMLQLTPISNSFTMFIIVWVILNYYAQLYIPPSIKGWLKKKKSSKKYKLLIQEEMKLKEV

SEQ ID NO: 22521 - protein, 1318 aa, Neurospora crassa
MAPLVDNAQIQSAELLRPLPLYLHAYVWPFAIIWPIFFRYYLDQDLYDKHINGQEWTFVWSGTIITIQALVWLCTHWNINLRAAFTAKKARSVNDAQLIKVIPVANAGISDICPIVRDTAGGKTNISFLFQKRRFLYNAETNSFSTLTYQIDDEPKPKLEVFQKSKGITTASELDRLEQHYGTNTFDIPVPTFTELFKEHAVAPFFVFQVFCVGLWMLDEYWYYSLFTLFMLVVFESTVVWQRQRTLNEFRSMSIKPYEIYVYRLGQWTETTSDKLLPGDLVSVTRTKEDSGVACDMLLVEGTAIVNEAMLSGESTPLLKDSIQLRPGEAQIEPEGLDKNAFLWGGTKVLQITHGNPDEEKPKLASGVPIPPDNGAMAIVTKTGFETSQGSLVRTMIYSTERVSANNAEALFFILFLLIFALAASWYVWDEGVRKDRKRSKLLLDCVLIVTSVVPPELPMELSLAVNTSLSALAKFAIFCTEPFRIPFAGRIDVACFDKTGTLTGEDLVVEGIAGLGLGHSGTDTPRESDGAHSHMTPVDEAGLETTLVLATAHALVRLDEGDIVGDPMEKATLTALGWSLGQNDMLKTKTGAKSTVLGNVQVKRRFQFSSALKRQSSVATINATDSKTGQKLRGTFVGVKGAPETIMKMLVTVPKDYEETYKYFTRRGSRVLALAYKQLSTENELGASKINDLKRENVEADLTFAGFLVLQCPLKEDAKQAVQMLNESSHRVVMITGDNPLTAVHVAREVEIVDRDVLILDAPEHSVHGEEKLIWRSVDDKVNIEVDPTKPIDPEIIKTKDLCVTGYALAKFKGQVGWKTLLRYTWVYARVSPKQKEDILLGLKDMGYYTLMAGDGTNDVGALKQAHIGVALLNGTQEDLIRIAEHARNNKIKDMYQKQVDLMKRWGQPAPPVPALIAHLYPPGPSNPHYNAAMEREAAKKGITVEKLAKSLHHPAAIETVTSPGAQALINQDPKQRQAAAAQKASSFADKLTSGMMDMEMDDDEPPTLKLGDASVAAPFTSKLRNVVAIPNIIRQGRCTLVATIQMYKILALNCLISAYSLSVLYLEGIKFGDGQITISGMLMSVCFLSISRAKSVEGLSKERPQPNIFNFYIIGSILGQFAVHVVTLIYIARFCDQLEPRSESVDLEAEFSPSLLNSAVYLLQLIQQISTFAVNYQGRPFRESLSENKGMFYGIVGVTAIAFACSTEMVPELNEAMKLVPFKEEFKWTMTIVMILDYVACWLIEVVFKYLFSDLKARDIAVRREDQLERERLRKAEELKKLEEVKRMKEEEEEKARMEKVAEFERRLRARMGGSA

SEQ ID NO: 22522 - protein, 1346 aa, Neurospora crassa
MNGGNDAHHASWRSSQSFDRRRASHDHRPGLYTLGSNQSNASIFEDVEMAHDELYSGPMAESLPTSVSAFNHRRARADSTTSFSFYQEDIDEHFETGEVASVEDLDELPFEDDYEGDVGASEMGSSDLERQAADDDYMLNRRSSTQSRRSGHSRILRRDSGLSASSGHGGNRTSQKVYMVNEDLYIAIAGFRTSTLGLAVYILICLSTFGLGWLLFRWVPRWHVKLVGRPSPLRDCQWVVIENSWNEMAILNVDSKPYGRVLSTVFGTPGKLASYSLDEDYDPILQDLRMLNYRYVRFFYHPLKDKFILCNGWKDPLWTDVQTIRSGIDSDEKSHRDAVFGGNLIDIEEKSTFRLLADEVFHPFYVFQIASLILWSVDEYYYYAIAIFVMSVGSIVATLIETKSTMKRLREISRFVCDVRVLRNGFWRHVSSSDLVPGDIYEVSDPSLSQFPADSLLLGGDCIVNESMLTGESVPVSKTPATDQSLRNLDLGASTVLPEVAKHFLFCGTKIIRARRPQDDHNEEAVALALVVRTGFNTTKGALVRSMLFPKPSGFKFYRDSFRYISVMACVAMVGFAASFVNFIRLNLSWHLIIVRALDLITIVVPPALPATLTIGTNFALGRLKSKKIFCISPQRVNVGGKLDIMCFDKTGTLTEEGLDVLGVRVVDRTNNRFSDILDNPDDLVPRQDHGTGIRDSSDTLKAALYTMATCHSLRSIDDELVGDPLDLKMFEFTRWSFEEGHEGGGATDGEEQGTLQPSIARPPTVDKGYTDADRQDATQNGRAPFELGVLKSFEFVSQLRRASVIVKTFGQKSGDIFVKGAPECMRDICKPESFPADYDDQLNYYTHKGYRVIGCATKHIPKLSWVKAQKMTRHNVESDLDFVGFIIFENKLKPATAPVLKELAESNIGSVMVTGDNILTAISVARECSLINKTAHCFVGRFVAGHSRDPNAKLQWESIDNPIYQLDDRTLLPLPPPPEGDVSLPYDISNLRNYSLAVSGDVFRWVIDYAPPEVMRRMLVTGKVFARMSPDEKHELVEKLQSIDYCCGFCGDGANDCGALKAADVGISLSEAEASVAAPFTSRVFDIRCVPEVIREGRAALVTSFSCFKYMSLYSAIQFTSVSFLYASASNLGDFQFLFIDLALILPIAVFMSWAGPFPELCRKRPTADLVSRKVLVPLLGQMFICIFIQTMAFIAVREQPWFIPPKVEHEKVNIRNSENTALFLTSCFEYILAGVVLNAGRPFRQPPWNNWPFVAAIAATLAFTGYMILGPAAGLVSLMDLTPISWDFKMFIFTLGIMYFVLAWVGEHVMFQRLARLIGKVSQSLTREPKKRKEYKVILERMIC

SEQ ID NO: 22523 - protein, 221 aa, Trichomonas vaginalis
DKTGTLTSEEYKLVGVDTLNAPAAPKNKTIKGNYFSSPSEMPVESMWVVGGCHSLIRGKYGKLIGDSLESAAFQQMHFKLNSDKSATYGDISITPIKEYHFSSELKRMTVVCNVSGRTQPIAVIKGAPEAVQPLLTTVPSDYKQAYLKYARRGCRVLVLGYRILEFNYDPSTAKRDDIEKNFIFAGFAIFDAPLKRGSEDTVVELLKSQHRVIIITGDGVN

SEQ ID NO: 22524 - protein, 1877 aa, Plasmodium yoelii
MVNFCKPDKLLIEYSELRCICFFYIFLLLCFFIWVFHKKWMRDNIEKKHKLKNYQAIFKSENVEFFNYIYESDDPNEIVVKQKGYKNCYIGFLLKKISIFLYICTHLIIIALISNEYCIKTNNEILWNARALEFFIFFLLSLTITYGILIIRKHIQSLFLKPSLLKDSDYVIIYTINEEYNTFYNTNYFKKYISHINHMIHTFIKKKKKNIKKNIKKWNFQKYNILFLQFVCNLLDIIQNYIPFPIFLEKIIKNIKESKVSHLNTHSFHDTKKKTHNLYTNPLFIENDVESLSDSEIRASNSHIESSQCVVEKKKRKEEARQTKFSLHKVQVKKNEKNVKYFFFRSMKYLYNEEKDAFINISYSIEEKVKSFNFNYILKKGGLNNNEIINNLNQYGYNNIHLDVNSFFINLKRELLDGIYMFQLYLTYKNLFWKEMITSIIWIVISILSVIKKVLKNQKNKKEIYDNIQSNSNINVTVYRNGLEQNISSNNLTIGDIIIVKSKMTIPCDCLLLTGQVLVDESLLTGESKPMKKIATSNENRSQIFKNEKEQNNDTSFSINEQNKINANNMLYAGTNIISIFNSPENIYAIVINVSIYTYKGKYMQSVLFPNPLLFKYDSQLPIVFIFTIIFSFFCFYFQIKYLGFNMTSIFYTIGTLSQILPVWTPVVLNIGLNISTNRLKNENNICCIAPSRIPICGKIRVFFFDKTGTITNHNLEFSGIHFCNNILSPQKNLVSKYFEKKNLEPVASDDISASVLTSSRPNTSPLTLTELATNDKKERDKKERDKKGRDKKERDKKGRDKKERDKKERDNKESDNRIDKNSAKNGENTKSGNSYYCSVYNEEEENINSTTLEKLNLNKNIREQNYNQTNKIEIIDKSSNSEKDDFKSPNFSICEKNSQSSNDDLFQSYDEGEYQKHSEHIPIKDEKIYTNHQSSHFDQLGKDEEIRKDAEIRKDEEIRKDEEIRKNEENFNGHSNLSANSNNINYFPNKLIKEENRKKKKKNSRHDENNNISNINKHFINSNSSINSVTSLLYNSKLIWSNKITLENMPDNYNLIVYALAGCACIYDDDNIIYGNEIDKKLYETTDMVIHNYINGDNINVKRISLKLGSIYKSFDVIKTFEFDYYTKISTTLTYGYFDFTEKVYIVFSKGSFDKIYQKCIKTDELYFYKQKEQEYSKNGFYVIALAFKIIYDLPKNKKKNNFYNLSRDEMETDMNFLSLIMFNNHIKVDAHYVIQTLKDSRIRPIILTGDNAYNCLYVGNKIGLFNNINTYESFYSLNVNSNNNIDHSNKKKNTNFSNNNSFNLSDIKFMPFENLFKYSSESKNFKENMNVNQIYDNNNDNDDDNDDNDDDNDNDNDNNNNSNSNNNNGDDDNNGVAKKKRQNSKYNTINTINQYGSNILDIDASKIEEEYLLESYKNMNPVNDDTYNYDQNIIVYGYILNNELIFVNIHNDNKINNTIVLYKDIYKEIILTGEAYNYIRDHIFKIQNFENETNSNLIHTNNNNNTFKQNPFLEQYKNFLLKVRIFSRLTPNNKMEIIKDFTKFDYISGMCGDGSNDCGALKTSHAGLALSNSDTSVVAPFSAKNENLKSVIDILREGRACLVTSINCYKYMLLYGFMISIIKIILFMRAHAIMSEYGYLFFDNIILLLLAKSMTLSKPEYKLKTQTPTSSIIGAQTILSLLCTLIVNFFFLYIIMFKFFFLCNLPSSYDINSSAPKSSWWLMSDNYESFLTCIWFCFQIVNSAFILTLGGKYRKHIFSNYTFMIYYVLINLFLFYLTIGGPNKLTCLFRMNCNDEISRQTKFKILELFSYSAGGLSFYGPNGNNILSTQVKIKFLFLNFLNIIINILISKYVLCERFYNIVRKIFKIQNRRIPT

SEQ ID NO: 22525 - protein, 1133 aa, Tetrahymena thermophila
MRVSSIEAEMENPIDVDKTDVEGELKIKQVTLLRENIVKKIVFFLVAIFCSDRPSVLKKVFYEEVSKQEEATHVYVLASDLTDYIEEASLKENPEEGGEKSIYFVNRLQKYIYHKKQNKFRAIEYFIQGKSYSEIANNKPLATGRVDQLLAYYGKSEIEINVPSFLTLMWREFKKPINFLLYFGIIVWGIEQMYVSTAITVVFTTTINSLICIYIRGVMQKLKDACLNNTSVIVQRHNGQGYQEITVASNMIAPGDIVLFKREVTLPFDCVILEGSCQVTEANITGENVAIGKCQIPTDHHNDIFKYESSKSHTLFQGTQLMKIEDDILKVIVVRTGFGSYKGQIIRALLYPKPFNKKFQQQAVKLTILMATLLLIGFLSTLSRLLDIELPPLFIAFRFLDILIYSAPPGMPMLIAITNFVGLKRLKNNQILGQDPNSASQAGRIQTLCFDKTGTLTEDKVDLIGYQLKGQNQTFDKIQCQDPNNISIEHKLFSICHEVTKINNKLLGDLMDVKMAEFSTLDIDYDHEAKQHYSKSGNKRFYCIQVNQFHSEYQSMSVVCKEVDMITKEFKHYFFIKGSPEKIQSLSHVQSSEKAQLSTLINEGYRILGFGYKEIPQSEIDAFLDLSREQQEANVQSLGFLIYKNNLKPDTQEVIKEFKEACYNIKVISGDNPITTLKISQELEIVNRKNPTVIINFEETENVKSHLIITEIQPDNSTQVIDFSSAQNEQDYINKQMSYCCDAFLNNKSFCFSGKAHYYFQLKAKTDHISFKPEWVKMQDKSVQKIISFYQMLIINTNVFARTQPEQKQTIVRLLKESDQIVCMVGDGANDCSAIREADVGISFAEADGQFSSSYVSLSTSLSCVKRVLLEGRVNLSNSVEIFKGYLQVALLRYLGFLTLAYFYSSYSSGQMDWQALASGYFLVYLILGCNTPLKKLEKSVFDDNLFSIYNVTSVLFGFTLHILSIVGCVESLHASPIYKEVNSLDAENNFQFETQHNTVLNFNILINFFYVIISNHIGKPMKDRYYKNTIAIYYDLGLIYTCKCMILQVLLILEHTHHGLIFLILLLDQEFSSSLTVQVYFSLPMNLFLPEEFSLNFTQEVKKEKELLICNSSSTILEVDYNLRLNYFQQNF

SEQ ID NO: 22526 - protein, 973 aa, Encephalitozoon cuniculi
MHIIYKERPLHKRLYVIPLYVLPAMLLTSGYPQAMFVFTLLVSGTMFLSTFWSNKVRILFSMDLNSKGSYILYRGSLCKLKDGVFEYEKSGYLVTGEKIVRLRANTEKPFGYFMKWEEKRDEFVEAELLKHFKKNRFDIVPPSFSELFLQHAVSPLFVFQVFSGLLWCLDEYVYQAMFSLVMLVVLESGLVFQRMMTARHFRRMSHSNVDVEILYDSRMNAKKGEGVMGSSENLFPGDVVKISSSIHVPCDLLLVKGSCAVNEAMLSGESVPLTKEDISERDAEDIFDGGRDRRHILYAGTEIVMMKDSPLVCFVLHTGFETEKGGLVRKMMCAEEVTVNDREAFIFILALLVFAIVASFYAYREGKKMGKSNYKLLLEVILILTNVVPTELPMELSMAVNSCVRALARKGVYCLEPFRIPYAGKVNVCCFDKTGTLTETVMEVAAVKHETENSVSVLASCHSLLSLNGKVTGDPLETSIYEHLRNTEPLNSKCLEHTIHKAYSFCSELRRMTVVVEAKGKRFVGMKGAPEVVKLYLDSVPEFYDDYKKYAADGYRVLALGFKPIEKQDKYDRTDVESKLSFAGFILFDCKLKKNVRKTIESLHGSGHKVIMITGDNVLTARNVSKKIGISDKAVEGSEIDKVLESDEFFSVSIFARADPAHKEKIIEKYNKAGRYTLMCGDGTNDVGALKSAHVGIALMEAPVAVKKKGEPKTREERMMESISKDLGEDKINLGDASVAAPFTAKTGSLDSVLDIIRQGRSALVTTIQMYKILALNSLVSAFSLSVLDCMGVRYGDVQLTASGLLIGFAFMFLTQSRPLEEISKKRPLTNIINPYIVSSVVLQVVVHIASFFIMIGRIRNVETPVYSEKFSPSLMNSALFFLSTTQQISTFLVNYIGRPFRESLLENKKLLGCLLILLFVIHQLVMGSNDELRVKMEVVDMGSAKMFVYAVLVMDIVLCYLVEKVCFHVFML

SEQ ID NO: 22527 - protein, 1146 aa, Encephalitozoon cuniculi
MKPLKMFVGIKQEKPFISVEGRKRRISTGFYNVLCVLTLGGFHMVCRYLPKVKHFLLSSPCSLSDADCVIVTSQNGRREFVDVLAYSTEEIPSLRRYSLEGKARVVDSLFSRLIYDVVSRRFVVPPEQKAVFRDFEELYSTEISKSPETERAEAIQRNIFYGRNVTSLPIPGVFDIVVKNTLNITFLSNIICLFVWRAVDYHNYAFVMGMLMLYSFVFTNWEEISHSIGMKKLVKRRTVKILRGGRFVEVDSREVYPGNIIYIEPCKEFPCDALVIRGDAITNECLLTGETVPIYKNADQLSVVYSGTDVLKSISTIPMSTNLRNENLCRVRSLTSKNRSRAAGMVGSIDVLGNSAVGMVLRTGFQTTRGQILKNMLNAKPVHNRFIREAEIIILGIVMVAMAVGIGMAYVLNKMGFDASTNLMYSLDLFFTFANPAIPTYLRVGTQLCYKKLIKKNIYCSNLNKIHLAGRIDTAVFDKTGTLTCEGLDLLCIDDLNRPVDDINKVAMVTRLGLSTCHLVYELDGRYSGDTLDLKMFIFSSSKLVQHENTRSVVIGGHNRIYGPILKEYNDSEEMVYYQKDRTHGGRFADIDGNADEEDKDLSPVLLDVDEGAKFNLSDECGEGQDGEINAVIMKTYEFDSNIRRMSVVVDDGDRKYVFTKGSPESIQEILKERPRGYEEKAKEYSLGGYRVISLAYKEISESADRASDESEMKFLALIVFSNKLKENSRRTVDELNKANIRNIMCTGDNILTAISVGKECRIVEEFVPVIFPVLEENAKSIFDVDWLCVGDEEEFTFDKVRLSLYRGNDRVSNNEFVVACEGREFDFFRNTHYFEFILEKGAIFARFNPGQKKALIENLRASGKITMFCGDGANDSGALSSADVGLALGQNEASLAANFTSSEISSVLDLIKEGRSAFVTSTATFKYVVSYCAIAYVVLVFLVLRKKFLSDLQTIHGDLLVSIPIAYMLTCFDASDKLFPSPPDTFLLPKKDFVPFCLTIALECLVLWILSLYGEPCPEISTQSITAELMFFVSTFIYIFNALYLSDCSPHRQSLKDNVLFKTFISFMILSTIAFLMVVYLFPEWTFLWLRGYNFVETDGFEIGLVLISAFSVTIAVFVVQPLVGRMLGDKSMQDMVPSKPEEKI

SEQ ID NO: 22528 - protein, 1178 aa, Caenorhabditis elegans
MGVDQLVETIIPYNLRSIATHLYVPPFTIITAIWTYVWLNIFGYEEYYELGMLGYAAIFVILALVLLFCHWMMPVRCFLMCSKQEDVRIASHVCVIPTQNNGWPELVKLMRTTRDKQTKLWFEFQRVHYTWDEESREFQTKTLDTAKPMVFFQKSHGFEVEEHVKDAKYLLGDNKTEMIVPQFLEMFIERATAPFFVFQVFCVGLWCLEDMWYYSLFTLFMLMTFEATLVKQQMKNMSEIRNMGNKTYMINVLRGKKWQKIKIEELVAGDIVSIGRGAEEECVPCDLLLLRGPCIVDESMLTGESVPQMKEPIEDVEKDKIFDIETDSRLHVIFGGTKIVQHTAPGKAAEGMVKSPDGNCICYVIRTGFNTSQGKLLRTIMFGVKKATANNLETFCFILFLLIFAIAAAAYLWIKGSVDETRSKYKLFLECTLILTSVIPPELPIELSLAVNSSLMALQKLGIFCTEPFRIPFAGKVDICCFDKTGTLTTDNLVVEGVALNNQKEGMIRNAEDLPHESLQVLASCHSLVRFEEDLVGDPLEKACLSWCGWNLTKGDAVMPPKTAAKGISGIKIFHRYHFSSAMKRMTVVAGYQSPGTSDTTFIVAVKGAPEVLRNMYADLPSDYDETYTRLTRQGSRVLAMGIRKLGETRVGELRDKKRENFENDLAFAGFVVISCPLKSDTKTMIREIMDSSHVVAMITGDNPLTACHVSKVLKFTKKSLPTLVLDEPADGVDWMWKSVDGTIELPLKPETKNKMERKAFFNSHEFCLTGSAFHHLVHNEHTFLRELILHVKVFARMAPKQKERIINELKSLGKVTLMCGDGTNDVGALKHANVGVALLTNPYDAEKAAEKEKEKKAKIEEARSLVRSGAQLPQRPGAPGAPPAANAARRDAPPGARARAPLPPMANAAQARLDNLMKELEEEEKAQVIKLGDASIAAPFTSKYTSIASICHVIKQGRCTLVTTLQMFKILALNALVSAYSLSALYLDGVKFSDTQATIQGLLLAACFLFISKSKPLKTLSRQRPMANIFNAYTLLTVTLQFIVHFSCLLYIVGLAHEANTEKAPVDLEAKFTPNILNTTVYIISMALQVCTFAVNYRGRPFMESLFENKAMLYSIMFSGGAVFTLASGQATDLMIQFELVVLPEALRNALLMCVTADLVICYIIDRGLNFLLGDMF

SEQ ID NO: 22529 - protein, 1157 aa, Caenorhabditis elegans
MGVDQLVETIIPYNLRSIATHLYVPPFTIITAIWTYVWLNIFGYEEYYELGMLGYAAIFVILALVLLFCHWMMPVRCFLMCSKQEDVRIASHVCVIPTQNNGWPELVKLMRTTRDKQTKLWFEFQRVHYTWDEESREFQTKTLDTAKPMVFFQKSHGFEVEEHVKDAKYLLGDNKTEMIVPQFLEMFIERATAPFFVFQVFCVGLWCLEDMWYYSLFTLFMLMTFEATLVKQQMKNMSEIRNMGNKTYMINVLRGKKWQKIKIEELVAGDIVSIGRGAEEECVPCDLLLLRGPCIVDESMLTGESVPQMKEPIEDVEKDKIFDIETDSRLHVIFGGTKIVQHTAPGKAAEGMVKSPDGNCICYVIRTGFNTSQGKLLRTIMFGVKKATANNLETFCFILFLLIFAIAAAAYLWIKGSVDETRSKYKLFLECTLILTSVIPPELPIELSLAVNSSLMALQKLGIFCTEPFRIPFAGKVDICCFDKTGTLTTDNLVVEGVALNNQKEGMIRNAEDLPHESLQVLASCHSLVRFEEDLVGDPLEKACLSWCGWNLTKGDAVMPPKTAAKGISGIKIFHRYHFSSAMKRMTVVAGYQSPGTSDTTFIVAVKGAPEVLRNMYADLPSDYDETYTRLTRQGSRVLAMGIRKLGETRVGELRDKKRENFENDLAFAGFVVISCPLKSDTKTMIREIMDSSHVVAMITGDNPLTACHVSKVLKFTKKSLPTLVLDEPADGVDWMWKSVDGTIELPLKPETKNKMERKAFFNSHEFCLTGSAFHHLVHNEHTFLRELILHVKVFARMAPKQKERIINELKSLGKVTLMCGDGTNDVGALKHANVGVALLTNPYDAEKAAEKEKEKKAKIEEARSLVRSGAQLPQRPGAPGAPPAANAARPRLDNLMKELEEEEKAQVIKLGDASIAAPFTSKYTSIASICHVIKQGRCTLVTTLQMFKILALNALVSAYSLSALYLDGVKFSDTQATIQGLLLAACFLFISKSKPLKTLSRQRPMANIFNAYTLLTVTLQFIVHFSCLLYIVGLAHEANTEKAPVDLEAKFTPNILNTTVYIISMALQVCTFAVNYRGRPFMESLFENKAMLYSIMFSGGAVFTLASGQATDLMIQFELVVLPEALRNALLMCVTADLVICYIIDRGLNFLLGDMF

SEQ ID NO: 22530 - protein, 1152 aa, Caenorhabditis elegans
MTSEREPLLDTTTRNRVYDTTDNPSTKIMKREKDNPKAKTTSFNQGKLNIGEETCDLYAYKETIGRQILFWLLTIVTLGFYQLLAYWVKSLFVKVRFQPTSHDECEYVMVEDIHGTQTIKEVFKAESDVGLARPTVRSGKQEKVKVMRFFTYRKIKYIWYEKDQEWLNPADMDSAAPFNIYQKLTLDVIGLKEQDVIASRKIYNMNALALALTPILVILFKEVLGPFYLFQCFSVALWYSDNYAYYASVIVIITVGSAAVAVYQMRAQEKRIRNMVGDTISVIVRRDGHDITIDASEIVPMDILILPSNTFILPCDCLLMNGTVIVNEAMLTGESVPVTKASLKEADECGPEIRLSSEHNRHTLFSGTTVLQTRNYKGQPVMARVIRTGFSTLKGQLVRSIMYPKPQEKEALKDVMVFILVLGFIALIGFIYTVIEMVSRGESLKHIIIRSLDIITIVVPPALPAAMSVGIINANSRLKKKKIFCTSPTTVNVCGLINVACFDKTGTLTEDGLDFNCLKAIRKNEDGKPEFTSEFEELDPVKLSAENANLNIVVAAASCHSLTRIDGTLHGDPLELILVEKSKWIIEEAVNSDEETQDFDTVQPTVLRPPPEQATYHPENNEYSVIKQHPFNSALQRMSVIISTPSEHSAHDMMVFTKGSPEMIASLCIPDTIPEDYMEVVDEYAQRGFRLIAVASKAVHLNFAKALKTPRDIMESELEFLGLIVMENRLKDVTLSVINELSVANIRCVMVTGDNLLTAMSVARECGIIRPTKKAFLITHSKTEKDPLGRTKLFIKESVSSSENDIDTDSEVRAFDRKAVLRTATYQMAIAGPTYSVITHEYPELVDRITAMCDVYARMAPDQKAQLIGALQEIGAKVSMCGDGANDCAALKAAHAGISLSQAEASIAAPFTSNVPDIRCVPTVIKEGRCALVTSYAVSKYMAAYSLNEFLSVMLLYNDGTNISDGQFLYIDLVLITLVALFLGNTEASRKLSGIPPPRRLATSAFYFSVFGQMFFNIITQTTGYLLVRGQSWYVPNPEELDNTTTMIGTTVFFTSCCMYLGYAFVYSKGHPYRRSVFTNWLLCGIIFVIGAINMVMIFTNMGFLMNLMGFVYVPSTSMRFILLAISLAGVFLSLLYEHFFVEKVVAIHFER

SEQ ID NO: 22531 - protein, 1127 aa, Caenorhabditis elegans
MSTNNYQTLSQNKADRMGPGGSRRPRNSQHATASTPSASSCKEQQKDVEHEFDIIAYKTTFWRTFFFYALSFGTCGIFRLFLHWFPKRLIQFRGKRCSVENADLVLVVDNHNRYDICNVYYRNKSGTDHTVVANTDGNLAELDELRWFKYRKLQYTWIDGEWSTPSRAYSHVTPENLASSAPTTGLKADDVALRRTYFGPNVMPVKLSPFYELVYKEVLSPFYIFQAISVTVWYIDDYVWYAALIIVMSLYSVIMTLRQTRSQQRRLQSMVVEHDEVQVIRENGRVLTLDSSEIVPGDVLVIPPQGCMMYCDAVLLNGTCIVNESMLTGESIPITKSAISDDGHEKIFSIDKHGKNIIFNGTKVLQTKYYKGQNVKALVIRTAYSTTKGQLIRAIMYPKPADFKFFRELMKFIGVLAIVAFFGFMYTSFILFYRGSSIGKIIIRALDLVTIVVPPALPAVMGIGIFYAQRRLRQKSIYCISPTTINTCGAIDVVCFDKTGTLTEDGLDFYALRVVNDAKIGDNIVQIAANDSCQNVVRAIATCHTLSKINNELHGDPLDVIMFEQTGYSLEEDDSESHESIESIQPILIRPPKDSSLPDCQIVKQFTFSSGLQRQSVIVTEEDSMKAYCKGSPEMIMSLCRPETVPENFHDIVEEYSQHGYRLIAVAEKELVVGSEVQKTPRQSIECDLTLIGLVALENRLKPVTTEVIQKLNEANIRSVMVTGDNLLTALSVARECGIIVPNKSAYLIEHENGVVDRRGRTVLTIREKEDHHTERQPKIVDLTKMTNKDCQFAISGSTFSVVTHEYPDLLDQLVLVCNVFARMAPEQKQLLVEHLQDVGQTVAMCGDGANDCAALKAAHAGISLSEAEASIAAPFTSKVADIRCVITLISEGRAALVTSYSAFLCMAGYSLTQFISILLLYWIATSYSQMQFLFIDIAIVTNLAFLSSKTRAHKELASTPPPTSILSTASMVSLFGQLAIGGMAQVAVFCLITMQSWFIPFMPTHHDNDEDRKSLQGTAIFYVSLFHYIVLYFVFAAGPPYRASIASNKAFLISMIGVTVTCIAIVVFYVTPIQYFLGCLQMPQEFRFIILAVATVTAVISIIYDRCVDWISERLREKIRQRRKGA

SEQ ID NO: 22532 - protein, 1111 aa, Caenorhabditis elegans
MGPGGSRRPRNSQHATASTPSASSCKEQQKDVEHEFDIIAYKTTFWRTFFFYALSFGTCGIFRLFLHWFPKRLIQFRGKRCSVENADLVLVVDNHNRYDICNVYYRNKSGTDHTVVANTDGNLAELDELRWFKYRKLQYTWIDGEWSTPSRAYSHVTPENLASSAPTTGLKADDVALRRTYFGPNVMPVKLSPFYELVYKEVLSPFYIFQAISVTVWYIDDYVWYAALIIVMSLYSVIMTLRQTRSQQRRLQSMVVEHDEVQVIRENGRVLTLDSSEIVPGDVLVIPPQGCMMYCDAVLLNGTCIVNESMLTGESIPITKSAISDDGHEKIFSIDKHGKNIIFNGTKVLQTKYYKGQNVKALVIRTAYSTTKGQLIRAIMYPKPADFKFFRELMKFIGVLAIVAFFGFMYTSFILFYRGSSIGKIIIRALDLVTIVVPPALPAVMGIGIFYAQRRLRQKSIYCISPTTINTCGAIDVVCFDKTGTLTEDGLDFYALRVVNDAKIGDNIVQIAANDSCQNVVRAIATCHTLSKINNELHGDPLDVIMFEQTGYSLEEDDSESHESIESIQPILIRPPKDSSLPDCQIVKQFTFSSGLQRQSVIVTEEDSMKAYCKGSPEMIMSLCRPETVPENFHDIVEEYSQHGYRLIAVAEKELVVGSEVQKTPRQSIECDLTLIGLVALENRLKPVTTEVIQKLNEANIRSVMVTGDNLLTALSVARECGIIVPNKSAYLIEHENGVVDRRGRTVLTIREKEDHHTERQPKIVDLTKMTNKDCQFAISGSTFSVVTHEYPDLLDQLVLVCNVFARMAPEQKQLLVEHLQDVGQTVAMCGDGANDCAALKAAHAGISLSEAEASIAAPFTSKVADIRCVITLISEGRAALVTSYSAFLCMAGYSLTQFISILLLYWIATSYSQMQFLFIDIAIVTNLAFLSSKTRAHKELASTPPPTSILSTASMVSLFGQLAIGGMAQVAVFCLITMQSWFIPFMPTHHDNDEDRKSLQGTAIFYVSLFHYIVLYFVFAAGPPYRASIASNKAFLISMIGVTVTCIAIVVFYVTPIQYFLGCLQMPQEFRFIILAVATVTAVISIIYDRCVDWISERLREKIRQRRKGA

SEQ ID NO: 22533 - protein, 1187 aa, Caenorhabditis elegans
MTLESGDHTLTLFAYRTGPFRTILFYALTVLTLGIFRLILHWKQKWDVKMRMVPCTFEAAEYIYIIDNHNVSELQPVLRKSNATIPTENGEMRKVPELRWFVYRKLEYVWIDDLNSDESVDEISDNDNCWKTSFEIANRIPCRSLLAVSESNFGLTLSEISRRLEFYGRNEIVVQLRPILYLLVMEVITPFYVFQIFSVTVWYNDEYAYYASLIVILSLGSIVMDVYQIRTQEIRLRSMVHSTESVEVIREGTEMTIGSDQLVPGDILLIPPHGCLMQCDSVLMNGTVIVNESVLTGESVPITKVALTDETNDSVFNIEKNSKNVLFCGTQVLQTRFYRGKKVKAIVLRTAYSTLKGQLVRSIMYPKPVDFRFTKDLFKFILFLACISGCGFIYTIIVMIMRGNTLRRIIVRSLDIITITVPPALPAAMSVGIINAQLRLKKKEIFCISPSTINTCGAINVVCFDKTGTLTEDGLDFHVVRPVMSAVNQEIQKVKLEKSNRTEFMGEMTELTSRNGLPFDGDLVKAIATCHSLTRINGVLHGDPLDLILFQKTGWTMEEGIEGDIEEETQRFDNVQPSIIKPTDDKSAEYSVIRQFTFSSSLQRMSVIVFDPREDRPDNMMLYSKGSPEMILSLCDPNTVPEDYLLQVNSYAQHGFRLIAVARRPLDLNFNKASKVKRDAVECDLEMLGLIVMENRVKPVTLGVINQLNRANIRTVMVTGDNLLTGLSVARECGIIRPSKRAFLVEHVPGELDEYGRTKIFVKQSVSSSDEVIEDDASVSISMCSSTWKGSSEGDGFSPTNTEVETPNPVTADSLGHLIASSYHLAISGPTFAVIVHEYPELVDQLCSVCDVFARMAPDQKQSLVEQLQQIDYTVAMCGDGANDCAALKAAHAGISLSDAEASIAAPFTSKVPDIRCVPTVISEGRAALVTSFGIFKYMAGYSLTQFVTVMHLYWISNILTDGQFMYIDMFLITMFALLFGNTPAFYRLAHTPPPTRLLSIASMTSVVGQLIIIGVVQFIVFFSTSQQPWFTPYQPPVDDEVEDKRSMQGTALFCVSMFQYIILALVYSKGPPFRGNLWSNKPIYKKKRSIEAIIDYVPTTNSDHIRRPSINGVTSSRTESTLLSAEGQQLHMTTSKNGKGGENPHSSALFERLISRIGGEPTWLTNPIPPHSLSEPEEPEKLERTY

SEQ ID NO: 22534 - protein, 1256 aa, Caenorhabditis elegans
MTLESGDHTLTLFAYRTGPFRTILFYALTVLTLGIFRLILHWKQKWDVKMRMVPCTFEAAEYIYIIDNHNVSELQPVLRKSNATIPTENGEMRKVPELRWFVYRKLEYVWIDDLNSDESVDEISDNDNCWKTSFEIANRIPCRSLLAVSESNFGLTLSEISRRLEFYGRNEIVVQLRPILYLLVMEVITPFYVFQIFSVTVWYNDEYAYYASLIVILSLGSIVMDVYQIRTQEIRLRSMVHSTESVEVIREGTEMTIGSDQLVPGDILLIPPHGCLMQCDSVLMNGTVIVNESVLTGESVPITKVALTDETNDSVFNIEKNSKNVLFCGTQVLQTRFYRGKKVKAIVLRTAYSTLKGQLVRSIMYPKPVDFRFTKDLFKFILFLACISGCGFIYTIIVMIMRGNTLRRIIVRSLDIITITVPPALPAAMSVGIINAQLRLKKKEIFCISPSTINTCGAINVVCFDKTGTLTEDGLDFHVVRPVMSAVNQEIQKVKLEKSNRTEFMGEMTELTSRNGLPFDGDLVKAIATCHSLTRINGVLHGDPLDLILFQKTGWTMEEGIEGDIEEETQRFDNVQPSIIKPTDDKSAEYSVIRQFTFSSSLQRMSVIVFDPREDRPDNMMLYSKGSPEMILSLCDPNTVPEDYLLQVNSYAQHGFRLIAVARRPLDLNFNKASKVKRDAVECDLEMLGLIVMENRVKPVTLGVINQLNRANIRTVMVTGDNLLTGLSVARECGIIRPSKRAFLVEHVPGELDEYGRTKIFVKQSVSSSDEVIEDDASVSISMCSSTWKGSSEGDGFSPTNTEVETPNPVTADSLGHLIASSYHLAISGPTFAVIVHEYPELVDQLCSVCDVFARMAPDQKQSLVEQLQQIDYTVAMCGDGANDCAALKAAHAGISLSDAEASIAAPFTSKVPDIRCVPTVISEGRAALVTSFGIFKYMAGYSLTQFVTVMHLYWISNILTDGQFMYIDMFLITMFALLFGNTPAFYRLAHTPPPTRLLSIASMTSVVGQLIIIGVVQFIVFFSTSQQPWFTPYQPPVDDEVEDKRSMQGTALFCVSMFQYIILALVYSKGPPFRGNLWSNKPMCALTIFATLLCLFIVIWPTELVLKTLGNVELPSLTFRIFIVIVGAVNAAVSYGFETLFVDFFLLGYWERYKKKRSIEAIIDYVPTTNSDHIRRPSINGVTSSRTESTLLSAEGQQLHMTTSKNGKGGENPHSSALFERLISRIGGEPTWLTNPIPPHSLSEPEEPEKLERTY

SEQ ID NO: 22535 - protein, 964 aa, Caenorhabditis elegans
MLTGESVPVTKASLKEADECGPEIRLSSEHNRHTLFSGTTVLQTRNYKGQPVMIRILKTALIESSVNLKARVIRTGFSTLKGQLVRSIMYPKPQEKEALKDVMVFILVLGFIALIGFIYTVIEMVSRGESLKHIIIRSLDIITIVVPPALPAAMSVGIINANSRLKKKKIFCTSPTTVNVCGLINVACFDKTGTLTEDGLDFNCLKAIRKNEDGKPEFTSEFEELDPVKLSAENANLNIVVAAASCHSLTRIDGTLHGDPLELILVEKSKWIIEEAVNSDEETQDFDTVQPTVLRPPPEQATYHPENNEYSVIKQHPFNSALQRMSVIISTPSEHSAHDMMVFTKGSPEMIASLCIPDTIPEDYMEVVDEYAQRGFRLIAVASKAVHLNFAKALKTPRDIMESELEFLGLIVMENRLKDVTLSVINELSVANIRCVMVTGDNLLTAMSVARECGIIRPTKKAFLITHSKTEKDPLGRTKLFIKESVSSSENDIDTDSEIGAKVSMCGDGANDCAALKAAHAGISLSQAEASIAAPFTSNVPDIRCVPTVIKEGRCALVTSYAVSKYMAAYSLNEFLSVMLLYNDGTNISDGQFLYIDLVLITLVALFLGNTEASRKLSGIPPPRRLATSAFYFSVFGQMFFNIITQTTGYLLVRGQSWYVPNPEELDNTTTMIGTTVFFTSCCMYLGYAFVYSKGHPYRRSVFTNWLLCGIIFVIGAINMVMIFTNMGFLMNLMGFVYVPSTSMRFILLAISLAGVFLSLLYEHFFVEKVVAIHFESCTVTMDLSSWFEFTMYDAVFLVVVLGFFFYWLTRSEQPLPAPPKELAPLPMSDMTVEELRKYDGVKNEHILFGLNGTIYDVTRGKGFYGPGKAYGTLAGHDATRALGTMDQNAVSSEWDDHTGISADEQETANEWETQFKFKYLTVGRLVKNSSEKADYGNRKSFVRGAESLDSIINGGDEGTKKDN

SEQ ID NO: 22536 - protein, 1225 aa, Drosophila melanogaster
MTEAAGATNPGGAAGDAESYGKEMALQSGRPKEPTKLDDLVQYVSLHVRIPTPLTGVVLPFVPLYLSAFYLWINVTGGQENDTTNNDVITADNQTTTDNITTWNDVGFIGVLAIAFLHILTLLFCYWSVHVLAFLTCRRVKLPGANVLAKVVPTPNNGNSKIVPIRSSKLEDGSTQYYFVFQKTKYVWNEDRKTFRAVEFPVNGLLSTYSSSRGLETEEDIKRATQTYGNNEMEMVVPEFHELFIERATAPFFVFQVFSVGLWCMDDYWYYSLFTLFMLIAFECTIVKQQLRNMSEIRKMGNKPYLIYAFRQNKWRHLGSDELLPGDLVSITRSQNDNIVPCDLVILRGSCIVDESMLTGESVPLMKKSLESLDNLDVEMDAEGDGKLFVLFGGTKVVQHTAPTKESLRAPDGGCIGYVIRTGFNTSQGKLLRTILFGANRATENNVETFAFIAFLMVFAVAAASYVWVKGSEDPERNRYKLFLECTLILTSIIPPDLPIELTLAVNTSLIQLTKLFVFCTEPFRIPFAGKVQICCFDKTGTLTTDNLMVEGIAGLAPNGACVPIEKAEGNTVQVLACCHSLALLDDGLVGDPLEKATLAAVDWTLTKMDSVIPKRPQFKPLKIIQRYHFSSALKRMSVLAGHLIPYSNEVKHIGAVKGAPEVIQKMLREVPADYEKVYLEYARRGARVLALGIKDLGTLGAQRVREMKREEVECDLTFAGFLIISCPMKPDSKSVIKELIQSSHKVVMITGDSPLTACHVARELRFTRKKLIILTPPEEDRKNNWSWVSIDGDQSYELDTKPGSKKLSHLLATHDLCITGEGLQYLQQNQPQYMRQLLPQITVCARFAPKQKELVITQLKQLGYCTLMCGDGTNDVGALKHANVGVSLLTSAPVKRKRTEEEQQQAAANAAAIAAQAQANANQQLTTRERALRRRQEHLNQTQARLQNALRDMEEQTMVKLGDASIAAPFTSKSSSIMCVNHIIKQGRCTLVTTLQMFKILALNALIQAYCQSVLYIDGIKFSDTQATMQGIFIAACFLFITRAKPLKTLSKVAPLPNIFNFYTISTILSQFAVHFGTLYYLTSQANILAPPREGKVKLYIDMDAEEKTKYDPNIVSSTVYIICLSLQVATIAVNYKGYPFMESLRSNRMLMYAIGASAALVILLSTGLAPELTEFFEIIDFPTDFRKTLLGVLVLDIVGAFLLDRICSFLFGETRRKSKVLNC

SEQ ID NO: 22537 - protein, 1225 aa, Drosophila melanogaster
MTEAAGATNPGGAAGDAESYGKEMALQSGRPKEPTKLDDLVQYVSLHVRIPTPLTGVVLPFVPLYLSAFYLWINVTGGQENDTTNNDVITADNQTTTDNITTWNDVGFIGVLAIAFLHILTLLFCYWSVHVLAFLTCRRVKLPGANVLAKVVPTPNNGNSKIVPIRSSKLEDGSTQYYFVFQKTKYVWNEDRKTFRAVEFPVNGLLSTYSSSRGLETEEDIKRATQTYGNNEMEMVVPEFHELFIERATAPFFVFQVFSVGLWCMDDYWYYSLFTLFMLIAFECTIVKQQLRNMSEIRKMGNKPYLIYAFRQNKWRHLGSDELLPGDLVSITRSQNDNIVPCDLVILRGSCIVDESMLTGESVPLMKESLESLDNLDVEMDAEGDGKLFVLFGGTKVVQHTAPTKESLRAPDGGCIGYVIRTGFNTSQGKLLRTILFGANRATENNVETFAFIAFLMVFAVAAASYVWVKGSEDPERNRYKLFLECTLILTSIIPPDLPIELTLAVNTSLIQLTKLFVFCTEPFRIPFAGKVQICCFDKTGTLTTDNLMVEGIAGLAPNGACVPIEKAEGNTVQVLACCHSLALLDDGLVGDPLEKATLAAVDWTLTKMDSVIPKRPQFKPLKIIQRYHFSSALKRMSVLAGHLIPYSNEVKHIGAVKGAPEVIQKMLREVPADYEKVYLEYARRGARVLALGIKDLGTLGAQRVREMKREEVECDLTFAGFLIISCPMKPDSKSVIKELIQSSHKVVMITGDSPLTACHVARELRFTRKKLIILTPPEEDRKNNWSWVSIDGDQSYELDTKPGSKKLSHLLATHDLCITGEGLQYLQQNQPQYMRQLLPQITVCARFAPKQKELVITQLKQLGYCTLMCGDGTNDVGALKHANVGVSLLTSAPVKRKRTEEEQQQAAANAAAIAAQAQANANQQLTTRERALRRRQEHLNQTQARLQNALRDMEEQTMVKLGDASIAAPFTSKSSSIMCVNHIIKQGRCTLVTTLQMFKILALNALIQAYCQSVLYIDGIKFSDTQATMQGIFIAACFLFITRAKPLKTLSKVAPLPNIFNFYTISTILSQFAVHFGTLYYLTSQANILAPPREGKVKLYIDMDAEEKTKYDPNIVSSTVYIICLSLQVATIAVNYKGYPFMESLRSNRMLMYAIGASAALVILLSTGLAPELTEFFEIIDFPTDFRKTLLGVLVLDIVGAFLLDRICSFLFGETRRKSKVLNC

SEQ ID NO: 22538 - protein, 993 aa, Drosophila melanogaster
MEMVVPEFHELFIERATAPFFVFQVFSVGLWCMDDYWYYSLFTLFMLIAFECTIVKQQLRNMSEIRKMGNKPYLIYAFRQNKWRHLGSDELLPGDLVSITRSQNDNIVPCDLVILRGSCIVDESMLTGESVPLMKESLESLDNLDVEMDAEGDGKLFVLFGGTKVVQHTAPTKESLRAPDGGCIGYVIRTGFNTSQGKLLRTILFGANRATENNVETFAFIAFLMVFAVAAASYVWVKGSEDPERNRYKLFLECTLILTSIIPPDLPIELTLAVNTSLIQLTKLFVFCTEPFRIPFAGKVQICCFDKTGTLTTDNLMVEGIAGLAPNGACVPIEKAEGNTVQVLACCHSLALLDDGLVGDPLEKATLAAVDWTLTKMDSVIPKRPQFKPLKIIQRYHFSSALKRMSVLAGHLIPYSNEVKHIGAVKGAPEVIQKMLREVPADYEKVYLEYARRGARVLALGIKDLGTLGAQRVREMKREEVECDLTFAGFLIISCPMKPDSKSVIKELIQSSHKVVMITGDSPLTACHVARELRFTRKKLIILTPPEEDRKNNWSWVSIDGDQSYELDTKPGSKKLSHLLATHDLCITGEGLQYLQQNQPQYMRQLLPQITVCARFAPKQKELVITQLKQLGYCTLMCGDGTNDVGALKHANVGVSLLTSAPVKRKRTEEEQQQAAANAAAIAAQAQANANQQLTTRERALRRRQEHLNQTQARLQNALRDMEEQTMVKLGDASIAAPFTSKSSSIMCVNHIIKQGRCTLVTTLQMFKILALNALIQAYCQSVLYIDGIKFSDTQATMQGIFIAACFLFITRAKPLKTLSKVAPLPNIFNFYTISTILSQFAVHFGTLYYLTSQANILAPPREGKVKLYIDMDAEEKTKYDPNIVSSTVYIICLSLQVATIAVNYKGYPFMESLRSNRMLMYAIGASAALVILLSTGLAPELTEFFEIIDFPTDFRKTLLGVLVLDIVGAFLLDRICSFLFGETRRKSKVLNC

SEQ ID NO: 22539 - protein, 1047 aa, Drosophila melanogaster
MHYVATESVQPKKSDKVPSNKIKKVENNNTLVNGCSKTSARSVPLLKYNRPDQDGDSEENITSVLEPNVDEIYSKDSERLVDDSKPCIGLLNPDQEDQMKVCGYRRSLMRTGFCWACIFLTGGLLRLVLHWWRHLYLYATCSQCSLEEAEQVLVTEDYQGKHKMYHVKQIQVLTSSNLKTLLEKEQQSIERTHIECDHVENVLQLSVHFTSAQFKKCSSIRIFRCKQLVYAWNNNTNRFQRINGLDLNIPCSYYHQQRGLPVHEQISRRIVFGDNEITVPLRDFKTLLFLEVLNPFYVFQLFSVILWFTYDYYYYACVILLMSVFGITVSVLQTKKNQDVLQKTVYNTGNAWVVDHKGLSKELPTRAIVPGDIIEIPSSGCTLHCDAILISGNCILDESMLTGESVPVTKTPLPSKRDMIFDKTEHARHTLFCGTKVIQTRYIGSKKVLAFVINTGNITAKGELIRSILYPPPVDYKFEQDSYKFIQFLAIIACVGFIYTLVTKILRGTDPVKIAVESLDLITIVVPPALPAAMTVGRFYAQKRLKTSEIFCISPRSINVAGSINCCCFDKTGTLTEDGLDMWGVVPKSSTNQFQIPLKSVDRLPFDHFLFGMVTCHSITILNGRMMGDPLDLKMFESTGWELEDSNNIPDTEKYGILYPTILRQPRGGLSGMAETESGSKNEIKRQSSVDDLLATVGISPSQKNFDHGIVREFPFTSALQRMSVVTRCLSDQVFNVYCKGSPEMLKKLCKPQSLPDNYSQQLSEFAKKGYRIIAIAFKALSHKMNYTKVQRLSREEVENNMEFLGFVILENRLKPDTTKVINALNAAKIRTIMITGDNILTAISVARDCGIVSPSQSVITVHADPIGDSANIQTNTGTECNFDNSSDKHYKLHYTLDLGSKTSRAYLFKSCFNSNLFDPETPEFTAQVGKTIFHMESTNSLVNESTSSYAESGLPTSDSLASVKTIDTWTHNDAELGIKHTPDESWRRQECIFAMDGKTWQIVKDYFPRNGNSFDTGFYLRPNVTRSETGTSYRTSKLGLLRCHVR

SEQ ID NO: 22540 - protein, 1338 aa, Drosophila melanogaster
MTPHNDSKDSKPCIGLLNPDQEDQMKVCGYRRSLMRTGFCWACIFLTGGLLRLVLHWWRHLYLYATCSQCSLEEAEQVLVTEDYQGKHKMYHVKQIQVLTSSNLKTLLEKEQQSIERTHIECDHVENVLQLSVHFTSAQFKKCSSIRIFRCKQLVYAWNNNTNRFQRINGLDLNIPCSYYHQQRGLPVHEQISRRIVFGDNEITVPLRDFKTLLFLEVLNPFYVFQLFSVILWFTYDYYYYACVILLMSVFGITVSVLQTKKNQDVLQKTVYNTGNAWVVDHKGLSKELPTRAIVPGDIIEIPSSGCTLHCDAILISGNCILDESMLTGESVPVTKTPLPSKRDMIFDKTEHARHTLFCGTKVIQTRYIGSKKVLAFVINTGNITAKGELIRSILYPPPVDYKFEQDSYKFIQFLAIIACVGFIYTLVTKILRGTDPVKIAVESLDLITIVVPPALPAAMTVGRFYAQKRLKTSEIFCISPRSINVAGSINCCCFDKTGTLTEDGLDMWGVVPKSSTNQFQIPLKSVDRLPFDHFLFGMVTCHSITILNGRMMGDPLDLKMFESTGWELEDSNNIPDTEKYGILYPTILRQPRGGLSGMAETESGSKNEIKRQSSVDDLLATVGISPSQKNFDHGIVREFPFTSALQRMSVVTRCLSDQVFNVYCKGSPEMLKKLCKPQSLPDNYSQQLSEFAKKGYRIIAIAFKALSHKMNYTKVQRLSREEVENNMEFLGFVILENRLKPDTTKVINALNAAKIRTIMITGDNILTAISVARDCGIVSPSQSVITVHADPIGDSANIQTNTGTECNFDNSSDKHYKLHYTLDLGSKTSRAYLFKSCFNSNLFDPETPEFTAQVGKTIFHMESTNSLVNESTSSYAESGLPTSDSLASVKTIDTWTHNDAELGIKHTPDESWRRQECIFAMDGKTWQIVKDYFPEEMEILLTRGSIYARMSPDQKQALVIELQNLDYCVAMCGDGANDCGALKVAHAGISLSETEASIASPFTSRNPTISAVLKVIKEGRAALVTSFGIFKYMAAYSLVQFISVMILYSIDSNLTDKQYLYVDLGLISIFAFFFGKTESFDGMLVEQVPLSSLISSTPLASLLLHLTVVTAFQVTCEYIYICKCQFCKHNVILFLNTIIGWVHLHQQPWFKAFEPADEDHLGCFENYTMFCISSFQYIILAFVFSKGAPYRKPLWSNWPLCLAFIVNLCIIVYLVLYPSDWVASFFQLIVPPTMRFRYVMLAYGAASFICHIFVESFLVEYLVFKKYQVKREKNWVTSKQKYMRLEHDISNIKNWPPITEVYEPNNLIDCETEQPTYVSLHAEQNHDTQLGKFPGFC

SEQ ID NO: 22541 - protein, 1314 aa, Drosophila melanogaster
MKVCGYRRSLMRTGFCWACIFLTGGLLRLVLHWWRHLYLYATCSQCSLEEAEQVLVTEDYQGKHKMYHVKQIQVLTSSNLKTLLEKEQQSIERTHIECDHVENVLQLSVHFTSAQFKKCSSIRIFRCKQLVYAWNNNTNRFQRINGLDLNIPCSYYHQQRGLPVHEQISRRIVFGDNEITVPLRDFKTLLFLEVLNPFYVFQLFSVILWFTYDYYYYACVILLMSVFGITVSVLQTKKNQDVLQKTVYNTGNAWVVDHKGLSKELPTRAIVPGDIIEIPSSGCTLHCDAILISGNCILDESMLTGESVPVTKTPLPSKRDMIFDKTEHARHTLFCGTKVIQTRYIGSKKVLAFVINTGNITAKGELIRSILYPPPVDYKFEQDSYKFIQFLAIIACVGFIYTLVTKILRGTDPVKIAVESLDLITIVVPPALPAAMTVGRFYAQKRLKTSEIFCISPRSINVAGSINCCCFDKTGTLTEDGLDMWGVVPKSSTNQFQIPLKSVDRLPFDHFLFGMVTCHSITILNGRMMGDPLDLKMFESTGWELEDSNNIPDTEKYGILYPTILRQPRGGLSGMAETESGSKNEIKRQSSVDDLLATVGISPSQKNFDHGIVREFPFTSALQRMSVVTRCLSDQVFNVYCKGSPEMLKKLCKPQSLPDNYSQQLSEFAKKGYRIIAIAFKALSHKMNYTKVQRLSREEVENNMEFLGFVILENRLKPDTTKVINALNAAKIRTIMITGDNILTAISVARDCGIVSPSQSVITVHADPIGDSANIQTNTGTECNFDNSSDKHYKLHYTLDLGSKTSRAYLFKSCFNSNLFDPETPEFTAQVGKTIFHMESTNSLVNESTSSYAESGLPTSDSLASVKTIDTWTHNDAELGIKHTPDESWRRQECIFAMDGKTWQIVKDYFPEEMEILLTRGSIYARMSPDQKQALVIELQNLDYCVAMCGDGANDCGALKVAHAGISLSETEASIASPFTSRNPTISAVLKVIKEGRAALVTSFGIFKYMAAYSLVQFISVMILYSIDSNLTDKQYLYVDLGLISIFAFFFGKTESFDGMLVEQVPLSSLISSTPLASLLLHLTVVTAFQVTCEYIYICKCQFCKHNVILFLNTIIGWVHLHQQPWFKAFEPADEDHLGCFENYTMFCISSFQYIILAFVFSKGAPYRKPLWSNWPLCLAFIVNLCIIVYLVLYPSDWVASFFQLIVPPTMRFRYVMLAYGAASFICHIFVESFLVEYLVFKKYQVKREKNWVTSKQKYMRLEHDISNIKNWPPITEVYEPNNLIDCETEQPTYVSLHAEQNHDTQLGKFPGFC

SEQ ID NO: 22542 - protein, 658 aa, Drosophila melanogaster
MFASQSKACDSPSETVHLQSLPNHIEDLKFRNSDVETDDDLHFPGIAAKNKILKLSWWHSPVDMHYVATESVQPKKSDKVPSNKIKKVENNNTLVNGCSKTSARSVPLLKYNRPDQDGDSEENITSVLEPNVDEIYSKDSERLVDDSKPCIGLLNPDQEDQMKVCGYRRSLMRTGFCWACIFLTGGLLRLVLHWWRHLYLYATCSQCSLEEAEQVLVTEDYQGKHKMYHVKQIQVLTSSNLKTLLEKEQQSIERTHIECDHVENVLQLSVHFTSAQFKKCSSIRIFRCKQLVYAWNNNTNRFQRINGLDLNIPCSYYHQQRGLPVHEQISRRIVFGDNEITVPLRDFKTLLFLEVLNPFYVFQLFSVILWFTYDYYYYACVILLMSVFGITVSVLQTKKNQDVLQKTVYNTGNAWVVDHKGLSKELPTRAIVPGDIIEIPSSGCTLHCDAILISGNCILDESMLTGESVPVTKTPLPSKRDMIFDKTEHARHTLFCGTKVIQTRYIGSKKVLAFVINTGNITAKGELIRSILYPPPVDYKFEQDSYKFIQFLAIIACVGFIYTLVTKILRGTDPVKIAVESLDLITIVVPPALPAAMTVGRFYAQKRLKTSEIFCISPRSINVAGSINCCCFDKILKYSILRERRERAILAVTKKVSA

SEQ ID NO: 22543 - protein, 521 aa, Drosophila melanogaster
MTPHNDSKDSKPCIGLLNPDQEDQMKVCGYRRSLMRTGFCWACIFLTGGLLRLVLHWWRHLYLYATCSQCSLEEAEQVLVTEDYQGKHKMYHVKQIQVLTSSNLKTLLEKEQQSIERTHIECDHVENVLQLSVHFTSAQFKKCSSIRIFRCKQLVYAWNNNTNRFQRINGLDLNIPCSYYHQQRGLPVHEQISRRIVFGDNEITVPLRDFKTLLFLEVLNPFYVFQLFSVILWFTYDYYYYACVILLMSVFGITVSVLQTKKNQDVLQKTVYNTGNAWVVDHKGLSKELPTRAIVPGDIIEIPSSGCTLHCDAILISGNCILDESMLTGESVPVTKTPLPSKRDMIFDKTEHARHTLFCGTKVIQTRYIGSKKVLAFVINTGNITAKGELIRSILYPPPVDYKFEQDSYKFIQFLAIIACVGFIYTLVTKILRGTDPVKIAVESLDLITIVVPPALPAAMTVGRFYAQKRLKTSEIFCISPRSINVAGSINCCCFDKILKYSILRERRERAILAVTKKVSA

SEQ ID NO: 22544 - protein, 497 aa, Drosophila melanogaster
MKVCGYRRSLMRTGFCWACIFLTGGLLRLVLHWWRHLYLYATCSQCSLEEAEQVLVTEDYQGKHKMYHVKQIQVLTSSNLKTLLEKEQQSIERTHIECDHVENVLQLSVHFTSAQFKKCSSIRIFRCKQLVYAWNNNTNRFQRINGLDLNIPCSYYHQQRGLPVHEQISRRIVFGDNEITVPLRDFKTLLFLEVLNPFYVFQLFSVILWFTYDYYYYACVILLMSVFGITVSVLQTKKNQDVLQKTVYNTGNAWVVDHKGLSKELPTRAIVPGDIIEIPSSGCTLHCDAILISGNCILDESMLTGESVPVTKTPLPSKRDMIFDKTEHARHTLFCGTKVIQTRYIGSKKVLAFVINTGNITAKGELIRSILYPPPVDYKFEQDSYKFIQFLAIIACVGFIYTLVTKILRGTDPVKIAVESLDLITIVVPPALPAAMTVGRFYAQKRLKTSEIFCISPRSINVAGSINCCCFDKILKYSILRERRERAILAVTKKVSA

SEQ ID NO: 22545 - protein, 595 aa, Drosophila melanogaster
MHYVATESVQPKKSDKVPSNKIKKVENNNTLVNGCSKTSARSVPLLKYNRPDQDGDSEENITSVLEPNVDEIYSKDSERLVDDSKPCIGLLNPDQEDQMKVCGYRRSLMRTGFCWACIFLTGGLLRLVLHWWRHLYLYATCSQCSLEEAEQVLVTEDYQGKHKMYHVKQIQVLTSSNLKTLLEKEQQSIERTHIECDHVENVLQLSVHFTSAQFKKCSSIRIFRCKQLVYAWNNNTNRFQRINGLDLNIPCSYYHQQRGLPVHEQISRRIVFGDNEITVPLRDFKTLLFLEVLNPFYVFQLFSVILWFTYDYYYYACVILLMSVFGITVSVLQTKKNQDVLQKTVYNTGNAWVVDHKGLSKELPTRAIVPGDIIEIPSSGCTLHCDAILISGNCILDESMLTGESVPVTKTPLPSKRDMIFDKTEHARHTLFCGTKVIQTRYIGSKKVLAFVINTGNITAKGELIRSILYPPPVDYKFEQDSYKFIQFLAIIACVGFIYTLVTKILRGTDPVKIAVESLDLITIVVPPALPAAMTVGRFYAQKRLKTSEIFCISPRSINVAGSINCCCFDKILKYSILRERRERAILAVTKKVSA

SEQ ID NO: 22546 - protein, 1682 aa, Plasmodium yoelii yoelii
  unsure (1)..(1682): unsure at all Xaa locations
MERKYNILAYKKRKTYFRLDVLLFIFYAYFLHLIFKNKKFEAQPKDYKYLEKIKTELENNDIFHSKNNSFSTSKWLYGENDGNKLNKLKIKKEKEKEKEKDKEKENEKDKENTNSDNTFKPIIVGKYNLIYIFYSIEFVCLLIFIAFHLLTFLLSQWSLSINLFIAYSRLSNKGRDKYIYNLQKFCTHIYIKPIKSEGFQKINKEKGLSKCVKNCLPNKNDTKKKERFNTDYNLYKPKSILVELKKENNDIYFFYKHKKYIFNYETLNFESVKHFDIFNLPFYLNWKGLIECENKISCQENFVKKINKESEILYIDGNIESSYINEWKNLINNIKELYEIECFKKNTKSKCNIIENNEELNENINYQVKGGYEISGKNNKKIGITNIYKNVYKNDYNNDYNNDYNNDYKNVYKSVYNYDCKKNYFEIPYDLYVHNNLNKYGENIYDIPSPCFKNLLYQAMLSPFFIFQFFSIILWMLDSYWYFGIFSIFILIVLESQLINKRIREFSLINSMKMSPQNVYVYRNLQWNIIKSNYLLPGDIYILSNDINGNDNICTCETLLLEGMCITDESILTGESIPLIKASIDKGVAINSNDNDNDNKNLDGTSYYSYFDKIDIKNKHKKHVVYAGSNILLTKNENPEFNNSKLPITGCVGVVLKNGFSTYQGKLVRTIINTSEKINSSSTDSIIFLFILLFFSITSCVYVVYTILKTTDERNLYKILLSASHIITAVIPPEFPITLSLGVTISIXYLYNLKIYCTEPFRLPFSGKSNICAFDKTGTLTEDNMVVLGLYGLDNKMNHIYESNKSIINKQRVPFLSLAVISGCHSLCTINNKLLGDPLEKNIFLKLNCNMKSIDNIYVRSSSYVSNGGNDITSDGGNKFSEFFISSKSLTNLNKRISNFGKENRQVKNNLIEHFFIYKRFFFSSDLQRMTCILQHTGYEGDWFGDLYESDDDTNVDNFCNDIENNIINKNLSNLNKLKKKKKKNISSNSITGSTINRSNNKNDMIKQYIVVSKGSPEIMKNFLKEIPENYDKILNSLSIKGYRVICLAANILDNKIINKNLRREDVEKNLYFCGFLAFLCPIKISTPIYISDIKNAGIKNIMITGDNALTACQVAQDVNMIPYVKDKDILILKISEHYNKGNNLYLKKSETSLSVDEDKQISIGEIKKNTIFNDDQIDILKKEAITNLQNIYKENLNKKKIIEHLINMIENEKNINNMLFFSNRENQKIIPFFIGNEEYIKLCSELFTLCITGNIIEYFFREYKNNINLIDMLINKVHIFCRVSPKNKEIIIKTLNKLGNITIMCGDGTNDMAALKAAHVGVSLLSIKICYKNKDLKNKIDENNNYIHNKSIIEHQNGNYEKQIPNINNCISDYKNVCAKYGNIPQYNLDNNMNAKYYEQIKLYNERKKQLENMMKNMDDSLPLIKLGEASIASPFTYKGNDIKCVKEIISCGRCALSKVIMMYKLMIINSLITAFSVSILTLDGVKLSDAQTTIISLLYTSFIVLISKTTPLESISSYAPPNSLFNITVVLSLLCQIIVHFSILIYGWIIASSFRGPDYVPDIKGDFSPNIVNTCIYYLIYCINLSIFLCNYEGLPFMLPLHKNKELVYIFIGNFFFLFLNIMNIVPYINYFFSLVPFPTYRLKFLFLSLMILDILAPYMFCNFIRYIRLYIFQKYKINL

SEQ ID NO: 22547 - protein, 1879 aa, Plasmodium yoelii yoelii
  unsure (1)..(1879): unsure at all Xaa locations
MVNFCKPDKLLIEYSELRCICFFYIFLLLCFFIWVFHKKWMRDNIEKKHKLKNYQAIFKSENVEFFNYIYESDDPNEIVVKQKGYKNCYIGFLLKKISIFLYICTHLIIIALISNEYCIKTNNEILWNARALEFFIFFLLSLTITYGILIIRKHIQSLFLKPSLLKDSDYVIIYTINEEYNTFYNTNYFKKYISHINHMIHTFIKKKKKNIKKNIKKWNFQKYNILFLQFVCNLLDIIQNYIPFPIFLEKIIKNIKESKVSHLNTHSFHDTKKKTHNLYTNPLFIENDVESLSDSEIRASNSHIESSQCVVEKKKRKEEARQTKFSLHKVQVKKNEKNVKYFFFRSMKYLYNEEKDAFINISYSIEEKVKSFNFNYILKKGGLNNNEIINNLNQYGYNNIHLDVNSFFINLKRELLDGIYMFQLYLTYKNLFWKEMITSIIWIVISILSVIKKVLKNQKNKKEIYDNIQSNSNINVTVYRNGLEQNISSNNLTIGDIIIVKSKMTIPCDCLLLTGQVLVDESLLTGESKPMKKIATSNENRSQIFKNEKEQNNDTSFSINEQNKINANNMLYAGTNIISIFNSPENIYAIVINVSIYTYKGKYMXSVLFPNPLLFKYDSQLPIVFIFTIIFSFFCFYFQIKYLGFNMTSIFYTIGTLSQILPVWTPVVLNIGLNISTNRLKNENNICCIAPSRIPICGKIRVFFFDKTGTITNHNLEFSGIHFCNNILSPQKNLVSKYFEKKNLEPVASDDISASVLTSSRPNTSPLTLTELATNDKKERDKKERDKKGRDKKERDKKGRDKKERDKKERDNKESDNRIDKNSAKNGENTKSGNSYYCSVYNEEEEEENINSTTLEKLNLNKNIREQNYNQTNKIEIIDKSSNSEKDDFKSPNFSICEKNSQSSNDDLFQSYDEGEYQKHSEHIPIKDEKIYTNHQSSHFDQLGKDEEIRKDAEIRKDEEIRKDEEIRKNEENFNGHSNLSANSNNINYFPNKLIKEENRKKKKKNSRHDENNNISNINKHFINSNSSINSVTSLLYNSKLIWSNKITLENMPDNYNLIVYALAGCACIYDDDNIIYGNEIDKKLYETTDMVIHNYINGDNINVKRISLKLGSIYKSFDVIKTFEFDYYTKISTTLTYGYFDFTEKVYIVFSKGSFDKIYQKCIKTDELYFYKQKEQEYSKNGFYVIALAFKIIYDLPKNKKKNNFYNLSRDEMETDMNFLSLIMFNNHIKVDAHYVIQTLKDSRIRPIILTGDNAYNCLYVGNKIGLFNNINTYESFYSLNVNSNNNIDHSNKKKNTNFSNNNSFNLSDIKFMPFENLFKYSSESKNFKENMNVNQIYDNNNDNDDDNDDNDDDNDNDNDNNNNSNSNNNNGDDDNNGVAKKKRQNSKYNTINTINQYGSNILDIDASKIEEEYLLESYKNMNPVNDDTYNYDQNIIVYGYILNNELIFVNIHNDNKINNTIVLYKDIYKEIILTGEAYNYIRDHIFKIQNFENETNSNLIHTNNNNNTFKQNPFLEQYKNFLLKVRIFSRLTPNNKMEIIKDFTKFDYISGMCGDGSNDCGALKTSHAGLALSNSDTSVVAPFSAKNENLKSVIDILREGRACLVTSINCYKYMLLYGFMISIIKIILFMRAHAIMSEYGYLFFDNIILLLLAKSMTLSKPEYKLKTQTPTSSIIGAQTILSLLCTLIVNFFFLYIIMFKFFFLCNLPSSYDINSSAPKSSWWLMSDNYESFLTCIWFCFQIVNSAFILTLGGKYRKHIFSNYTFMIYYVLINLFLFYLTIGGPNKLTCLFRMNCNDEISRQTKFKILELFSYSAGGLSFYGPNGNNILSTQVKIKFLFLNFLNIIINILISKYVLCERFYNIVRKIFKIQNRRIPT

SEQ ID NO: 22548 - protein, 504 aa, Macaca fascicularis
MDKEERKIINQGQEDEMEIYGYNLSRWKLAIVSLGVICTGGFLLLLLYWMPEWRVKATCVRAAIKDCDVVLLRTTDEFKMWFCAKIRVLSLETHPISSPKSMSNKLSNGHAVCLTENPTGENRHGISKYSQAESQQIRYFTHHSVKYFWNDTIHNFDFLKGLDEGVSCTSIYEKHSAGLTKGMHAYRKLLYGVNEIAVKVPSVFKLLIKEVLNPFYIFQLFSVILWSTDEYYYYALAIVVMSIVSIVSSLYSIRKQYVMLHDMVATHSTVRVSVCRVNEEIEEIFSTDLVPGDVMVIPLNGTIMPCDAVLINGTCIVNESMLTGESVPVTKTNLPNPSVDVKGIGDELYNPETHKRHTLFCGTTVIQTRFYTGELVKAIVVRTGFSTSKGQLVRSILYPKPTDFKLYRDAYLFLLCLVAVAGIGFIYTIINSILNEVQVGVIIIESLDIITITVPPALPAAMTAGIVYAQRRLKKIGIFCISPQRINICGQLKKKKKKKKKKKK

SEQ ID NO: 22549 - protein, 1204 aa, Homo sapiens
MAAAAAVGNAVPCGARPCGVRPDGQPKPGPQPRALLAAGPALIANGDELVAAVWPYRRLALLRRLTVLPFAGLLYPAWLGAAAAGCWGWGSSWVQIPEAALLVLATICLAHALTVLSGHWSVHAHCALTCTPEYDPSKATFVKVVPTPNNGSTELVALHRNEGEDGLEVLSFEFQKIKYSYDALEKKQFLPVAFPVGNAFSYYQSNRGFQEDSEIRAAEKKFGSNKAEMVVPDFSELFKERATAPFFVFQVFCVGLWCLDEYWYYSVFTLSMLVAFEASLVQQQMRNMSEIRKMGNKPHMIQVYRSRKWRPIASDEIVPGDIVSIGRSPQENLVPCDVLLLRGRCIVDEAMLTGESVPQMKEPIEDLSPDRVLDLQADSRLHVIFGGTKVVQHIPPQKATTGLKPVDSGCVAYVLRTGFNTSQGKLLRTILFGVKRVTANNLETFIFILFLLVFAIAAAAYVWIEGTKDPSRNRYKLFLECTLILTSVVPPELPIELSLAVNTSLIALAKLYMYCTEPFRIPFAGKVEVCCFDKTGTLTSDSLVVRGVAGLRDGKEVTPVSSIPVETHRALASCHSLMQLDDGTLVGDPLEKAMLTAVDWTLTKDEKVFPRSIKTQGLKIHQRFHFASALKRMSVLASYEKLGSTDLCYIAAVKGAPETLHSMFSQCPPDYHHIHTEISREGARVLALGYKELGHLTHQQAREVKREALECSLKFVGFIVVSCPLKADSKAVIREIQNASHRVVMITGDNPLTACHVAQELHFIEKAHTLILQPPSEKGRQCEWRSIDGSIVLPLARGSPKALALEYALCLTGDGLAHLQATDPQQLLRLIPHVQVFARVAPKQKEFVITSLKELGYVTLMCGDGTNDVGALKHADVGVALLANAPERVVERRRRPRDSPTLSNSGIRATSRTAKQRSGLPPSEEQPTSQRDRLSQVLRDLEDESTPIVKLGDASIAAPFTSKLSSIQCICHVIKQGRCTLVTTLQMFKILALNALILAYSQSVLYLEGVKFSDFQATLQGLLLAGCFLFISRSKPLKTLSRERPLPNIFNLYTILTVMLQFFVHFLSLVYLYREAQARSPEKQEQFVDLYKEFEPSLVNSTVYIMAMAMQMATFAINYKGPPFMESLPENKPLVWSLAVSLLAIIGLLLGSSPDFNSQFGLVDIPVEFKLVIAQVLLLDFCLALLADRVLQFFLGTPKLKVPS

SEQ ID NO: 22550 - protein, 1203 aa, Homo sapiens
AAAAAVGNAVPCGARPCGVRPDGQPKPGPQPRALLAAGPALIANGDELVAAVWPYRRLALLRRLTVLPFAGLLYPAWLGAAAAGCWGWGSSWVQIPEAALLVLATICLAHALTVLSGHWSVHAHCALTCTPEYDPSKATFVKVVPTPNNGSTELVALHRNEGEDGLEVLSFEFQKIKYSYDALEKKQFLPVAFPVGNAFSYYQSNRGFQEDSEIRAAEKKFGSNKAEMVVPDFSELFKERATAPFFVFQVFCVGLWCLDEYWYYSVFTLSMLVAFEASLVQQQMRNMSEIRKMGNKPHMIQVYRSRKWRPIASDEIVPGDIVSIGRSPQENLVPCDVLLLRGRCIVDEAMLTGESVPQMKEPIEDLSPDRVLDLQADSRLHVIFGGTKVVQHIPPQKATTGLKPVDSGCVAYVLRTGFNTSQGKLLRTILFGVKRVTANNLETFIFILFLLVFAIAAAAYVWIEGTKDPSRNRYKLFLECTLILTSVVPPELPIELSLAVNTSLIALAKLYMYCTEPFRIPFAGKVEVCCFDKTGTLTSDSLVVRGVAGLRDGKEVTPVSSIPVETHRALASCHSLMQLDDGTLVGDPLEKAMLTAVDWTLTKDEKVFPRSIKTQGLKIHQRFHFASALKRMSVLASYEKLGSTDLCYIAAVKGAPETLHSMFSQCPPDYHHIHTEISREGARVLALGYKELGHLTHQQAREVKREALECSLKFVGFIVVSCPLKADSKAVIREIQNASHRVVMITGDNPLTACHVAQELHFIEKAHTLILQPPSEKGRQCEWRSIDGSIVLPLARGSPKALALEYALCLTGDGLAHLQATDPQQLLRLIPHVQVFARVAPKQKEFVITSLKELGYVTLMCGDGTNDVGALKHADVGVALLANAPERVVERRRRPRDSPTLSNSGIRATSRTAKQRSGLPPSEEQPTSQRDRLSQVLRDLEDESTPIVKLGDASIAAPFTSKLSSIQCICHVIKQGRCTLVTTLQMFKILALNALILAYSQSVLYLEGVKFSDFQATLQGLLLAGCFLFISRSKPLKTLSRERPLPNIFNLYTILTVMLQFFVHFLSLVYLYREAQARSPEKQEQFVDLYKEFEPSLVNSTVYIMAMAMQMATFAINYKGPPFMESLPENKPLVWSLAVSLLAIIGLLLGSSPDFNSQFGLVDIPVEFKLVIAQVLLLDFCLALLADRVLQFFLGTPKLKVPS

SEQ ID NO: 22551 - protein, 1086 aa, Homo sapiens
MEKWEELNSHQPGEEYDPSKATFVKVVPTPNNGSTELVALHRNEGEDGLEVLSFEFQKIKYSYDALEKKQFLPVAFPVGNAFSYYQSNRGFQEDSEIRAAEKKFGSNKAEMVVPDFSELFKERATAPFFVFQVFCVGLWCLDEYWYYSVFTLSMLVAFEASLVQQQMRNMSEIRKMGNKPHMIQVYRSRKWRPIASDEIVPGDIVSIGRSPQENLVPCDVLLLRGRCIVDEAMLTGESVPQMKEPIEDLSPDRVLDLQADSRLHVIFGGTKVVQHIPPQKATTGLKPVDSGCVAYVLRTGFNTSQGKLLRTILFGVKRVTANNLETFIFILFLLVFAIAAAAYVWIEGTKDPSRNRYKLFLECTLILTSVVPPELPIELSLAVNTSLIALAKLYMYCTEPFRIPFAGKVEVCCFDKTGTLTSDSLVVRGVAGLRDGKEVTPVSSIPVETHRALASCHSLMQLDDGTLVGDPLEKAMLTAVDWTLTKDEKVFPRSIKTQGLKIHQRFHFASALKRMSVLASYEKLGSTDLCYIAAVKGAPETLHSMFSQCPPDYHHIHTEISREGARVLALGYKELGHLTHQQAREVKREALECSLKFVGFIVVSCPLKADSKAVIREIQNASHRVVMITGDNPLTACHVAQELHFIEKAHTLILQPPSEKGRQCEWRSIDGSIVLPLARGSPKALALEYALCLTGDGLAHLQATDPQQLLRLIPHVQVFARVAPKQKEFVITSLKELGYVTLMCGDGTNDVGALKHADVGVALLANAPERVVERRRRPRDSPTLSNSGIRATSRTAKQRSGLPPSEEQPTSQRDRLSQVLRDLEDESTPIVKLGDASIAAPFTSKLSSIQCICHVIKQGRCTLVTTLQMFKILALNALILAYSQSVLYLEGVKFSDFQATLQGLLLAGCFLFISRSKPLKTLSRERPLPNIFNLYTILTVMLQFFVHFLSLVYLYREAQARSPEKQEQFVDLYKEFEPSLVNSTVYIMAMAMQMATFAINYKGPPFMESLPENKPLVWSLAVSLLAIIGLLLGSSPDFNSQFGLVDIPVEFKLVIAQVLLLDFCLALLADRVLQFFLGTPKLKVPS

SEQ ID NO: 22552 - protein, 1158 aa, Homo sapiens [sequence omitted]

SEQ ID NO: 22553 - protein, 1088 aa, Homo sapiens
RDKEDSSWQLFTVQVQTEAIGEGSLEPSPQSQAEDGRSQAAVGAVPEGAWKDTAQLHKSEEAVSVGQKRVLRYYLFQGQRYIWIETQQAFYQVSLLDHGRSCDDVHRSRHGLSLQDQMVRKAIYGPNVISIPVKSYPQLLVDEALNPYYGFQAFSIALWLADHYYWYALCIFLISSISICLSLYKTRKQSQTLRDMVKLSMRVCVCRPGGEEEWVDSSELVPGDCLVLPQEGGLMPCDAALVAGECMVNESSLTGESIPVLKTALPEGLGPYCAETHRRHTLFCGTLILQARAYVGPHVLAVVTRTGFCTAKGGLVSSILHPRPINFKFYKHSMKFVAALSVLALLGTIYSIFILYRNRVPLNEIVIRALDLVTVVVPPALPAAMTVCTLYAQSRLRRQGIFCIHPLRINLGGKLQLVCFDKTGTLTEDGLDVMGVVPLKGQAFLPLVPEPRRLPVGPLLRALATCHALSRLQDTPVGDPMDLKMVESTGWVLEEEPAADSAFGTQVLAVMRPPLWEPQLQAMEEPPVPVSVLHRFPFSSALQRMSVVVAWPGATQPEAYVKGSPELVAGLCNPETVPTDFAQMLQSYTAAGYRVVALASKPLPTVPSLEAAQQLTRDTVEGDLSLLGLLVMRNLLKPQTTPVIQALRRTRIRAVMVTGDNLQTAVTVARGCGMVAPQEHLIIVHATHPERGQPASLEFLPMESPTAVNGVKDPDQAASYTVEPDPRSRHLALSGPTFGIIVKHFPKLLPKVLVQGTVFARMAPEQKTELVCELQKLQYCVGMCGDGANDCGALKAADVGISLSQAEASVVSPFTSSMASIECVPMVIREGRCSLDTSFSVFKYMALYSLTQFISVLILYTINTNLGDLQFLAIDLVITTTVAVLMSRTGPALVLGRVRPPGALLSVPVLSSLLLQMVLVTGVQLGGYFLTLAQPWFVPLNRTVAAPDNLPNYENTVVFSLSSFQYLILAAAVSKGAPFRRPLYTNVPFLVALALLSSVLVGLVLVPGLLQGPLALRNITDTGFKLLLLGLVTLNFVGAFMLESVLDQCLPACLRRLRPKRASKKRFKQLERELAEQPWPPLPAGPLR

SEQ ID NO: 22554 - protein, 1180 aa, Homo sapiens
MSADSSPLVGSTPTGYGTLTIGTSIDPLSSSVSSVRLSGYCGSPWRVIGYHVVVWMMAGIPLLLFRWKPLWGVRLRLRPCNLAHAETLVIEIRDKEDSSWQLFTVQVQTEAIGEGSLEPSPQSQAEDGRSQAAVGAVPEGAWKDTAQLHKSEEAVSVGQKRVLRYYLFQGQRYIWIETQQAFYQVSLLDHGRSCDDVHRSRHGLSLQDQMVRKAIYGPNVISIPVKSYPQLLVDEALNPYYGFQAFSIALWLADHYYWYALCIFLISSISICLSLYKTRKQSQTLRDMVKLSMRVCVCRPGGEEEWVDSSELVPGDCLVLPQEGGLMPCDAALVAGECMVNESSLTGESIPVLKTALPEGLGPYCAETHRRHTLFCGTLILQARAYVGPHVLAVVTRTGFCTAKGGLVSSILHPRPINFKFYKHSMKFVAALSVLALLGTIYSIFILYRNRVPLNEIVIRALDLVTVVVPPALPAAMTVCTLYAQSRLRRQGIFCIHPLRINLGGKLQLVCFDKTGTLTEDGLDVMGVVPLKGQAFLPLVPEPRRLPVGPLLRALATCHALSRLQDTPVGDPMDLKMVESTGWVLEEEPAADSAFGTQVLAVMRPPLWEPQLQAMEEPPVPVSVLHRFPFSSALQRMSVVVAWPGATQPEAYVKGSPELVAGLCNPETVPTDFAQMLQSYTAAGYRVVALASKPLPTVPSLEAAQQLTRDTVEGDLSLLGLLVMRNLLKPQTTPVIQALRRTRIRAVMVTGDNLQTAVTVARGCGMVAPQEHLIIVHATHPERGQPASLEFLPMESPTAVNGVKDPDQAASYTVEPDPRSRHLALSGPTFGIIVKHFPKLLPKVLVQGTVFARMAPEQKTELVCELQKLQYCVGMCGDGANDCGALKAADVGISLSQAEASVVSPFTSSMASIECVPMVIREGRCSLDTSFSVFKYMALYSLTQFISVLILYTINTNLGDLQFLAIDLVITTTVAVLMSRTGPALVLGRVRPPGALLSVPVLSSLLLQMVLVTGVQLGGYFLTLAQPWFVPLNRTVAAPDNLPNYENTVVFSLSSFQYLILAAAVSKGAPFRRPLYTNVPFLVALALLSSVLVGLVLVPGLLQGPLALRNITDTGFKLLLLGLVTLNFVGAFMLESVLDQCLPACLRRLRPKRASKKRFKQLERELAEQPWPPLPAGPLR

SEQ ID NO: 22555 - protein, 1009 aa, Homo sapiens
RYIWIETQQAFYQVSLLDHGRSCDDVHRSRHGLSLQDQMVRKAIYGPNVISIPVKSYPQLLVDEALNPYYGFQAFSIALWLADHYYWYALCIFLISSISICLSLYKTRKQSQTLRDMVKLSMRVCVCRPGGEEEWVDSSELVPGDCLVLPQEGGLMPCDAALVAGECMVNESSLTGESIPVLKTALPEGLGPYCAETHRRHTLFCGTLILQARAYVGPHVLAVVTRTGFCTAKGGLVSSILHPRPINFKFYKHSMKFVAALSVLALLGTIYSIFILYRNRVPLNEIVIRALDLVTVVVPPALPAAMTVCTLYAQSRLRRQGIFCIHPLRINLGGKLQLVCFDKTGTLTEDGLDVMGVVPLKGQAFLPLVPEPRRLPVGPLLRALATCHALSRLQDTPVGDPMDLKMVESTGWVLEEEPAADSAFGTQVLAVMRPPLWEPQLQAMEEPPVPVSVLHRFPFSSALQRMSVVVAWPGATQPEAYVKGSPELVAGLCNPETVPTDFAQMLQSYTAAGYRVVALASKPLPTVPSLEAAQQLTRDTVEGDLSLLGLLVMRNLLKPQTTPVIQALRRTRIRAVMVTGDNLQTAVTVARGCGMVAPQEHLIIVHATHPERGQPASLEFLPMESPTAVNGVKDPDQAASYTVEPDPRSRHLALSGPTFGIIVKHFPKLLPKVLVQGTVFARMAPEQKTELVCELQKLQYCVGMCGDGANDCGALKAADVGISLSQAEASVVSPFTSSMASIECVPMVIREGRCSLDTSFSVFKYMALYSLTQFISVLILYTINTNLGDLQFLAIDLVITTTVAVLMSRTGPALVLGRVRPPGALLSVPVLSSLLLQMVLVTGVQLGGYFLTLAQPWFVPLNRTVAAPDNLPNYENTVVFSLSSFQYLILAAAVSKGAPFRRPLYTNVPFLVALALLSSVLVGLVLVPGLLQGPLALRNITDTGFKLLLLGLVTLNFVGAFMLESVLDQCLPACLRRLRPKRASKKRFKQLERELAEQPWPPLPAGPLR

SEQ ID NO: 22556 - protein, 840 aa, Homo sapiens
MGHFEKGQHALLNEGEENEMEIFGYRTQGCRKSLCLAGSIFSFGILPLVFYWRPAWHVWAHCVPCSLQEADTVLLRTTDEFQIYSWKKVIWIYLSALNSAFGLTPDHPLMTDEEYIINRAIRKPDLKVRCIKVQKIRYVWNYLEGQFQKIGSLEDWLSSAKIHQKFGSGLTREEQEIRRLICGPNTIDVEVTPIWKLLIKEVLNPFYIFQLFSVCLWFSEDYKEYAFAIIIMSIISISLTVYDLREQSVKLHHLVESHNSITVSVCGRKAGVQELESRVLVPGDLLILTGNKVLMPCDAVLIEGSCVVDEGMLTGESIPVTKTPLPKMDSSVPWKTQSEADYKRHVLFCGTEVIQAKAACSGTVRAVVLQTGFNTAKGDLVRSILYPKPVNFQLYRDAIRFLLCLVGTATIGMIYTLCVYVLSGEPPEEVVRKALDVITIAVPPALPAALTTGIIYAQRRLKKRGIFCISPQRINVCGQLNLVCFDKTGTLTRDGLDLWGVVSCDRNGFQEVHSFASGQALPWGPLCAAMASCHSLILLDGTIQGDPLDLKMFEATTWEMAFSGDDFHIKGVPAHAMVVKPCRTASQVPVEGIAILHQFPFSSALQRMTVIVQEMGGDRLAFMKGAPERVASFCQPETVPTSFVSELQIYTTQGFRVIALAYKKLENDHHATTLTRETVESDLIFLGLLILENRLKEETKPVLEELISARIRTVMITGDNLQTAITVARKSGMVSESQKVILIEANETTGSSSASISWTLVEEKKHIMYGNQDNYINIRDEVSDKGREGSYHFALTGKSFHVISQHFSSLLPKILINGTIFARMSPGQKSSLVEEFQKLE

SEQ ID NO: 22557 - protein, 701 aa, Homo sapiens
MSEIEEIFSTDLVPGDVMVIPLNGTIMPCDAVLINGTCIVNESMLTGESVPVTKTNLPNPSVDVKGIGDQLYNPETHKRHTLFCGTTVIQTRFYTGELVKAIVVRTGFSTSKGQLVRSILYPKPTDFKLYRDAYLFLLCLVAVAGIGFIYTIINSILNEVQVGVIIIESLDIITITVPPALPAAMTAGIVYAQRRLKKIGIFCISPQRINICGQLNLVCFDKTGTLTEDGLDLWGIQRVENARFLSPEENVCNEMLVKSQFVACMATCHSLTKIEGVLSGDPLDLKMFEAIGWILEEATEEETALHNRIMPTVVRPPKQLLPESTPAGNQEMELFELPATYEIGIVRQFPFSSALQRMSVVARVLGDRKMDAYMKGAPEAIAGLCKPETVPVDFQNVLEDFTKQGFRVIALAHRKLESKLTWHKVQNISRDAIENNMDFMGLIIMQNKLKQEPPAVLEDLHKANIRTVMVTGDSMLTAVSVARDCGMILPQDKVIIAEALPPKDGKVAKINWHYADSLTQCSHPSAIDPEAIPVKLVHDSLEDLQMTRYHFAMNGKSFSVILEHFQDLVPKLMLHGTVFARMAPDQKTQLIEALQNVDYFVGMCGDGANDCGALKRAHGGISLSELEASVASPFTSKTPSISCVPNLIREGRAALITSSCELALFSIVTYSLDHFIISILISSMLVLFFSDFHNCAFYSLV

SEQ ID NO: 22558 - protein, 842 aa, Homo sapiens [sequence omitted]

SEQ ID NO: 22559 - protein, 290 aa, Homo sapiens
ILTGNKVLMPCDAVLIEGSCVVDEGMLTGESIPVTKTPLPKMDSSVPWKTQSEADYKRHVLFCGTEVIQAKAACSGTVRAVVLQTGFNTAKGDLVRSILYPKPVNFQLYRDAIRFLLCLVGTATIGMIYTLCVYVLSGEPPEEVVRKALDVITIAVPPALPAALTTGIIYAQRRLKKRGIFCISPQRINVCGQLNLVCFDKTGTLTRDGLDLWGVVSCDRNGFQEVHSFASGQALPWGPLCAAMASCHSLILLDGTIQGDPLDLKMFEATTWVSLCSSENLRSFFNARAT

SEQ ID NO: 22560 - protein, 684 aa, Homo sapiens
TDFKLYRDAYLFLLCLVAVAGIGFIYTIINSILNEVQVGVIIIESLDIITITVPPALPAAMTAGIVYAQRRLKKIGIFCISPQRINICGQLNLVCFDKTGTLTEDGLDLWGIQRVENARFLSPEENVCNEMLVKSQFVACMATCHSLTKIEGVLSGDPLDLKMFEAIGWILEEATEEETALHNRIMPTVVRPPKQLLPESTPAGNQEMELFELPATYEIGIVRQFPFSSALQRMSVVARVLGDRKMDAYMKGAPEAIAGLCKPETVPVDFQNVLEDFTKQGFRVIALAHRKLESKLTWHKVQNISRDAIENNMDFMGLIIMQNKLKQETPAVLEDLHKANIRTVMVTGDSMLTAVSVARDCGMILPQDKVIIAEALPPKDGKVAKINWHYADSLTQCSHPSAIDPEAIPVKLVHDSLEDLQMTRYHFAMNGKSFSVILEHFQDLVPKLMLHGTVFARMAPDQKTQLIEALQNVDYFVGMCGDGANDCGALKRAHGGISLSELEASVASPFTSKTPSISCVPNLIREGRAALITSFCVFKFMALYSIIQYFSVTLLYSILSNLGDFQFLFIDLAIILVVVFTMSLNPAWKELVAQRPPSGLISGALLFSVLSQIIICIGFQSLGFFWVKQQPWYEVWHPKSDACNTTGSGFWNSSHVDNETELDELIYKIMKIPQCFLFPVFSTS

SEQ ID NO: 22561 - protein, 624 aa, Homo sapiens
MTAGIVYAQRRLKKIGIFCISPQRINICGQLNLVCFDKTGTLTEDGLDLWGIQRVENARFLSPEENVCNEMLVKSQFVACMATCHSLTKIEGVLSGDPLDLKMFEAIGWILEEATEEETALHNRIMPTVVRPPKQLLPESTPAGNQEMELFELPATYEIGIVRQFPFSSALQRMSVVARVLGDRKMDAYMKGAPEAIAGLCKPETVPVDFQNVLEDFTKQGFRVIALAHRKLESKLTWHKVQNISRDAIENNMDFMGLIIMQNKLKQETPAVLEDLHKANIRTVMVTGDSMLTAVSVARDCGMILPQDKVIIAEALPPKDGKVAKINWHYADSLTQCSHPSAIDPEAIPVKLVHDSLEDLQMTRYHFAMNGKSFSVILEHFQDLVPKLMLHGTVFARMAPDQKTQLIEALQNVDYFVGMCGDGANDCGALKRAHGGISLSELEASVASPFTSKTPSISCVPNLIREGRAALITSFCVFKFMALYSIIQYFSVTLLYSILSNLGDFQFLFIDLAIILVVVFTMSLNPAWKELVAQRPPSGLISGALLFSVLSQIIICIGFQSLGFFWVKQQPWYEVWHPKSDACNTTGSGFWNSSHVDNETELDELIYKIMKIPQCFLFPVFSTS

SEQ ID NO: 22562 - protein, 1149 aa, Mus musculus
MPTMRRTVSEIRSRAEGYEKTDDVSEKTSLADQEEVRTIFINQPQLTKFCNNHVSTAKYNVITFLPRFLYSQFRRAANSFFLFIALLQQIPDVSPTGRYTTLVPLLFILAVAAIKEIIEDIKRHKADNAVNKKQTQVLRNGAWEIVHWEKVNVGDIVIIKGKEYIPADTVLLSSSEPQAMCYIETSNLDGETNLKIRQGLPATSDIKDIDSLMRISGRIECESPNRHLYDFVGNIRLDGHGTVPLGADQILLRGAQLRNTQWVHGIVVYTGHDTKLMQNSTSPPLKLSNVERITNVQILILFCILIAMSLVCSVGSAIWNRRHSGKDWYLHLHYGGASNFGLNFLTFIILFNNLIPISLLVTLEVVKFTQAYFINWDLDMHYEPTDTAAMARTSNLNEELGQVKYIFSDKTGTLTCNVMQFKKCTIAGVAYGQSSQFGDEKTFNDPSLLDNLQNNHPTAPIICEFLTMMAVCHTAVPEREGDKIIYQAASPDEGALVRAAKQLNFVFTGRTPDSVIIDSLGQEERYELLNVLEFTSARKRMSVVVRTPSGKLRLYCKGADTVIYERLAETSKYKEITLKHLEQFATEGLRTLCFAVAEISESDFEEWRAVYHRASTSVQNRLLKLEESYELIEKNLQLLGATAIEDKLQDQVPETIETLMKADIKIWILTGDKQETAINIGHSCRLLKRNMGMIVINEGSLDGTRETLSRHCTTLGDALRKENDFALIIDGKTLKYALTFGVRQYFLDLALSCKAVICCRVSPLQKSEVVEMVKKQVKVITLAIGDGANDVSMIQTAHVGVGISGNEGLQAANSSDYSIAQFKYLKNLLMVHGAWNYNRVSKCILYCFYKNIVLYIIEIWFAFVNGFSGQILFERWCIGLYNVMFTAMPPLTLGIFERSCRKENMLKYPELYKTSQNALDFNTKVFWVHCLNGLFHSVILFWFPLKALQYGTVFGNGKTSDYLLLGNFVYTFVVITVCLKAGLETSYWTWFSHIAIWGSIALWVVFFGIYSSLWPAVPMAPDMSGEAAMLFSSGVFWVGLLSIPVASLLLDVLYKVIKRTAFKTLVDEVQELEAKSQDPGAVVLGKSLTERAQLLKNVFKKNHVNLYRSESLQQNLLHGYAFSQDENGIVSQSEVIRAYDTTKQRPDEW

SEQ ID NO: 22563 - protein, 1164 aa, Mus musculus
MPTMRRTVSEIRSRAEGYEKTDDVSEKTSLADQEEVRTIFINQPQLTKFCNNHVSTAKYNVITFLPRFLYSQFRRAANSFFLFIALLQQIPDVSPTGRYTTLVPLLFILAVAAIKEIIEDIKRHKADNAVNKKQTQVLRNGAWEIVHWEKVAVGEIVKVTNGEHLPADLLSLSSSEPQAMCYIETSNLDGETNLKIRQGLPATSDIKDIDSLMRISGRIECESPNRHLYDFVGNIRLDGHGTVPLGADQILLRGAQLRNTQWVHGIVVYTGHDTKLMQNSTSPPLKLSNVERITNVQILILFCILIAMSLVCSVGSAIWNRRHSGKDWYLHLHYGGASNFGLNFLTFIILFNNLIPISLLVTLEVVKFTQAYFINWDLDMHYEPTDTAAMARTSNLNEELGQVKYIFSDKTGTLTCNVMQFKKCTIAGVAYGHVPEPEDYGCSPDEWQSSQFGDEKTFNDPSLLDNLQNNHPTAPIICEFLTMMAVCHTAVPEREGDKIIYQAASPDEGALVRAAKQLNFVFTGRTPDSVIIDSLGQEERYELLNVLEFTSARKRMSVVVRTPSGKLRLYCKGADTVIYERLAETSKYKEITLKHLEQFATEGLRTLCFAVAEISESDFEEWRAVYHRASTSVQNRLLKLEESYELIEKNLQLLGATAIEDKLQDQVPETIETLMKADIKIWILTGDKQETAINIGHSCRLLKRNMGMIVINEGSLDGTRETLSRHCTTLGDALRKENDFALIIDGKTLKYALTFGVRQYFLDLALSCKAVICCRVSPLQKSEVVEMVKKQVKVITLAIGDGANDVSMIQTAHVGVGISGNEGLQAANSSDYSIAQFKYLKNLLMVHGAWNYNRVSKCILYCFYKNIVLYIIEIWFAFVNGFSGQILFERWCIGLYNVMFTAMPPLTLGIFERSCRKENMLKYPELYKTSQNALDFNTKVFWVHCLNGLFHSVILFWFPLKALQYGTVFGNGKTSDYLLLGNFVYTFVVITVCLKAGLETSYWTWFSHIAIWGSIALWVVFFGIYSSLWPAVPMAPDMSGEAAMLFSSGVFWVGLLSIPVASLLLDVLYKVIKRTAFKTLVDEVQELEAKSQDPGAVVLGKSLTERAQLLKNVFKKNHVNLYRSESLQQNLLHGYAFSQDENGIVSQSEVIRAYDTTKQRPDEW

SEQ ID NO: 22564 - protein, 1148 aa, Mus musculus
MSRATSVGDQLEAPARIIYLNQSHLNKFCDNRISTAKYSVLTFLPRFLYEQIRRAANAFFLFIALLQQIPDVSPTGRYTTLVPLVIILTIAGIKEIIEDFKRHKADNAVNKKKTIVLRNGMWHTIMWKEVAVGDIVKVLNGQYLPADMVLFSSSEPQGMCYVETANLDGETNLKIRQGLSHTTDMQTRDVLMKLSGRIECEGPNRHLYDFTGNLHLDGKSSVALGPDQILLRGTQLRNTQWVFGVVVYTGHDSKLMQNSTKAPLKRSNVEKVTNVQILVLFGILLVMALVSSVGALFWNGSHGGKSWYIKKMDTNSDNFGYNLLTFIILYNNLIPISLLVTLEVVKYTQALFINWDMDMYYIENDTPAMARTSNLNEELGQVKYLFSDKTGTLTCNIMNFKKCSIAGVTYGHFPELAREQSSDDFCRMTSCTNDSCDFNDPRLLKNIEDQHPTAPCIQEFLTLLAVCHTVVPEKDGDEIIYQASSPDEAALVKGAKKLGFVFTGRTPYSVIIEAMGQEQTFGILNVLEFSSDRKRMSVIVRLPSGQLRLYCKGADNVIFERLSKDSKYMEETLCHLEYFATEGLRTLCVAYADLSENEYEEWLKVYQEASIILKDRAQRLEECYEIIEKNLLLLGATAIEDRLQAGVPETIATLLKAEIKIWVLTGDKQETAINIGYSCRLVSQNMALILLKEDSLDATRAAITQHCTDLGNLLGKENDVALIIDGHTLKYALSFEVRRSFLDLALSCKAVICCRVSPLQKSEIVDVVKKRVKAITLAIGDGANDVGMIQTAHVGVGISGNEGMQATNNSDYAIAQFSYLEKLLLVHGAWSYNRVTKCILYCFYKNVVLYIIELWFAFVNGFSGQILFERWCIGLYNVIFTALPPFTLGIFERSCTQESMLRFPQLYRITQNAEGFNTKVFWGHCINALVHSLILFWVPMKALEHDTPVTSGHATDYLFVGNIVYTYVVVTVCLKAGLETTAWTKFSHLAVWGSMLIWLVFFGVYSTIWPTIPIAPDMKGQATMVLSSAYFWLGLFLVPTACLIEDVAWRAAKHTCKKTLLEEVQELETKSRVMGKAMLRDSNGKRMNERDRLIKRLSRKTPPTLFRTGSIQQCVSHGYAFSQEEHGAVTQEEIVRAYDTTKENSRKK

SEQ ID NO: 22565 - protein, 1187 aa, Mus musculus
MDCSLLRTLVRRYCAGEENWVDSRTIYVGHKEPPPGAEAYIPQRYPDNRIVSSKYTFWNFIPKNLFEQFRRIANFYFLIIFLVQLIIDTPTSPVTSGLPLFFVITVTAIKQGYEDWLRHKADNAMNQCPVHFIQHGKLVRKQSRKLRVGDIVMVKEDETFPCDLIFLSSNRADGTCHVTTASLDGESSHKTHYAVQDTKGFHTEADVDSLHATIECEQPQPDLYKFVGRINVYNDLNDPVVRPLGSENLLLRGATLKNTEKIFGVAIYTGMETKMALNYQSKSQKRSAVEKSMNTFLIVYLCILVSKALINTVLKYVWQSEPFRDEPWYNEKTESERQRNLFLRAFTDFLAFMVLFNYIIPVSMYVTVEMQKFLGSYFITWDEDMFDEEMGEGPLVNTSDLNEELGQVEYIFTDKTGTLTENNMAFKECCIEGHVYVPHVICNGQVLPDSSGIDMIDSSPGVCGREREELFFRAICLCHTVQVKDDHCGDDVDGPQKSPDAKSCVYISSSPDEVALVEGVQRLGFTYLRLKDNYMEILNRENDIERFELLEVLTFDSVRRRMSVIVKSTTGEIYLFCKGADSSIFPRVIEGKVDQVRSRVERNAVEGLRTLCVAYKRLEPEQYEDACRLLQSAKVALQDREKKLAEAYEQIEKDLVLLGATAVEDRLQEKAADTIEALQKAGIKVWVLTGDKMETASATCYACKLFRRSTQLLELTTKKLEEQSLHDVLFDLSKTVLRCSGSMTRDSFSGLSTDMHDYGLIIDGAALSLIMKPREDGSSSGNYRELFLEICRNCSAVLCCRMAPLQKAQIVKLIKFSKEHPITLAIGDGANDVSMILEAHVGIGVIGKEGRQAARNSDYAIPKFKHLKKMLLVHGHFYYIRISELVQYFFYKNVCFIFPQFLYQFFCGFSQQTLYDTAYLTLYNISFTSLPILLYSLMEQHVGIDVLKRDPTLYRDIAKNALLRWRVFIYWTFLGVFDALVFFFGAYFIFENTTVTINGQMFGNWTFGTLVFTVMVLTVTLKLALDTHYWTWINHFVIWGSLLFYIAFSLLWGGVIWPFLSYQRMYYVFISMLSSGPAWLGIILLVTVGLLPDVLKKVLCRQLWPTATERTQNIQHQDSISEFTPLASLPSWGAQGSRLLAAQCSSPSGRVVCSRWESEECPVLPLHPGLPHKARYGCCRSSLEMPT

SEQ ID NO: 22566 - protein, 1116 aa, Mus musculus
MFRRTLNRLCAGEEKRVGTRTVFVGNHPISGTEPYIAQRFCDNRIVSSKYTLWNFLPKNLFEQFRRIANFYFLIIFLVQVTVDTPTSPVTSGLPLFFVITVTAIKQGYEDWLRHRADNEVNKSAVYIIENAKRVRKESEKIKVGDVVEVQANETFPCDLILLSSCTTDGTCYVTTASLDGESNCKTHYAVRDTIALCTAESIDNLRATIECEQPQPDLYRFVGRISIYSNSIEAVARSLGPENLLLKGATLKNTKKIYGVAVYTGMETKMALNYQGKSQKCSAVEKSINAFLIVYLFILLTKAAVCTTLKYVWQSSPYNDEPWYNQKTQKERETFQVLKMFTDFLSFMVLFNFIIPVSMYVTVEMQKFLGSFFISWDKDFFDEEINEGALVNTSDLNEELGQVDYVFTDKTGTLTENSMEFIECCIDGHKYKGTTQEVDGLSQTDGPLAYFDKADKNREALFLRALCLCHTVEMKTNDDVDGPVEGAGFTYISSSPDEIALVKGAKRFGFTFLGNQNGYIRVENQRKEIEEYELLHTLNFDSVRRRMSVIVRTQKGDILLFCKGADSSIFPRVHSHQIELTKDHVERNAMDGYRTLCVAFKEIPPDDFERINAQLVEAKMALQDREEKLEKVFDEIETNMNLIGATAVEDKLQDQAAETIEALHAAGLKVWVLTGDKMETAKSTCYACRLFQTNTELLELTTKTIEESERKEDRLHELLIEYRKKLLHEFPKSTRSLKKAWTEHQEYGLIIDGSTLSLILNSSQDCSSNNYKSIFLQICMKCTAVLCCRMAPLQKAQIVRMVKNLKGSPITLSIGDGANDVSMILESHVGIGIKGKEGRQAARNSDYSVPKFKHLKKLLLVHGHLYYVRIAHLVQYFFYKNLCFILPQFLYQFFCGFSQQPLYDAAYLTMYNICFTSLPILAYSLLEQHINIDTLTADPRLYMKITGNAMLQLGPFLHWTFLAAFEGTVFFFGTYFLFQTSSLEDNGKIYGNWTFGTIVFTVLVFTVTLKLALDTRFWTWINHFVIWGSLAFYVFFSFFWGGIIWPFLKQQRMYFVFAQMLCSVSTWLAIILLIFISLFPEILLIVVKNVRRRSARNPNLELPMLLSYKHIDRGCS

SEQ ID NO: 22567 - protein, 589 aa, Mus musculus
MNNSEPQAMCYIETSNLDGETNLKIRQGLPATSDIKDIDSLMRISGRIECESPNRHLYDFVGNIRLDGHGTVPLGADQILLRGAQLRNTQWVHGIVVYTGHDTKLMQNSTSPPLKLSNVERITNVQILILFCILIAMSLVCSVGSAIWNRRHSGKDWYLHLHYGGASNFGLNFLTFIILFNNLIPISLLVTLEVVKFTQAYFINWDLDMHYEPTDTAAMARTSNLNEELGQVKYIFSDKTGTLTCNVMQFKKCTIAGVAYGQSSQFGDEKTFNDPSLLDNLQNNHPTAPIICEFLTMMAVCHTAVPEREGDKIIYQAASPDEGALVRAAKQLNFVFTGRTPDSVIIDSLGQEERYELLNVLEFTSARKRMSVVVRTPSGKLRLYCKGADTVIYERLAETSKYKEITLKHLEQFATEGLRTLCFAVAEISESDFEEWRAVYHRASTSVQNRLLKLEESYELIEKNLQLLGATAIEDKLQDQVPETIETLMKADIKIWILTGDKQETAINIGHSCRLLKRNMGMIVINEGSLDGTRETLSRHCTTLGDALRKENDFALIIDGKTLKYALTFGVRQYLLDLALSCKAVICCR

SEQ ID NO: 22568 - protein, 1477 aa, Rattus norvegicus
MGDTPTAQEAPRRRMIHTGRSGKYRLRFGGPTSMDDAHLEEDLEDKDTEFTWEVKANDRAYHKQFRKKGFLCWRQKKYKSNAIHTAKYNVFSFLPLNLYEQFRRVSNLYFLFIIILQSIPEISTLPWFTLFAPLVCLLMIRAARDLVDDIGSLRAGNGAGAWQSATSVSFILLIQGRHRSDRIINNRPCQILKGKSFLWKKWKNLCVGDVVCLSKDNIVPADLLLLASTEPSSLCYLETADIDGETNLKFRQALMVTHHELTSPKKMASFQGIVTCEEPNSRMHHFVGSLEWNSRKYPLDIGNLLLRGCKIRNTDTCYGLVIYAGLDTKIMKNCGKIHLKRTKLDLMMNKLVILIFMSLVIASMFLTLGFAFMVKEFKAKHHYMSSMQGRTDAMDSFFIFWGFLILLSVMVPMAMFIIAEFIYLGNSIFINWDLSMYYEPLDIPAKARSTSLNDHLGQVQYIFSDKTGTLTQNIMTFKKCCINGCTYVRSPWGINAWTKNQTTSNVVLSLTILGVPWKPELGRNPYSWNPFADGKLQFYNKELESLVRGKQDRAVQEFWRLLAICHTVMVQEKDNQLLYQAASPDEEALVAAARNFGYVFLSRTQDTITLVELGEERVYQVLAMMDFNSVRKRMSVLVRNPEGSICLYTKGADTVILERLHHKGVMEATTEEVLAAFAEQTLRTLCLAYKDVAEDAYKEWEPEHQEAALLLQNRAQALHQVYNKLEQNLQLLGVTAIEDKLQDGVPETIRCLKKGNIKMWVLTGDKPGREIGRGWGRPQGTDQDSVVGGALGKSVGLQDLALTRSACNLAGFAETAVNIGFACQLLSENMSILEDKDIKGLLENYWDENEHQRAFQTMTHHNMALVINGEFLDQLLLSLRKEPRALVQNAVVDEATQEPGVSALDFLQARRISQMWRNFGTTMATSQSDASKTRESPEERRERAFVDLASKCQAVICCRVTPKQKALVVALVKKYQQVVTLAIGDGANDVNMIKTADIGVGLAGQEGMQAVQNSDYVLAQFCYLQRLLLVHGRWSYMRICKFLRYFFYKTVASMMAQIWFSLFNGFSAQSGEGSPLLQPLYEGWFLALFNLLYSTLPVLYIGLFEQDVTAEKSLKMPELYTAGQKDELFNYSIFVQAIAHGTITSLINFFVTILVSYDMTKTGSSPDYQSFGVLVAISSLLSITLEVILVVKYWTLLFVGTVVVSLSSYVIFTSLTESLLLFRISPKTFPFLFADYNVIREPSSLLVIVLNVTLNTLPMLAVRIIRRTVLKRHPKKEEEVPSEELTVEPAMRLRRGMPARRSSYAFSHHEGYANLITQGTILRRHTHVDEFYGDTACNSPNPSEEDVPWQHKESIFNPRKISILAKKRRQHYGKGSQGEVHPNASSQTTEKQTAINIDNHETKKLPTTTSAMSGQLQVSSSEDQAFYSALSQYSLASRPERMDVRSSSWKGPLLRDSASSRSSHLEVTTQLHSHTSS

SEQ ID NO: 22569 - protein, 1793 aa, Rattus norvegicus
MVALDIDAIRTQAHIVQTGFMYPGPAHKAVGKAPSEACDTSVILSSQSLGCVESSLDWQCGWHPIDPTFHCGHGLAVWMASCPPHPPLWPWTGSVDGILPTPPLHCGHGLAVWMASCPPHPCTVAMDWQCGRHPVHPTPALWPWTGSVDGILSTPPCTVAMRTECLTFVWIEDANLQLKAFEMLGAHSTHELLSVIEVEQYRTKQLYVPRVLHMATHAGAVTLSMTKVQIPQCASVAFVSECRPSLSSAFPWPVLVCYTGVCEKEEKCHCAEHVGSCQMSSSRPFGIAWAVFPEASPMAPLRFCLELNKWAWLLGFYAVPAFSFFLSEELEIQHLTCVWRLWLSIVTVGQSISMEDTCALWLVPPYDSAPRNVVGSLCPNPADTYVDPWSVALTCKDEAEKQASHSASGTDVGQELRSFRIHWDELDVVGKGILSCIPCPLWASSVIAAGIWFQGWSLFQSEGIVGKISTRSFKHTLMMLFYPQCAGEENWVDSRTIYVGHKEPPPGAEAYIPQRYPDNRIVSSKYTFWNFIPKNLFEQFRRIANFYFLIIFLVQLIIDTPTSPVTSGLPLFFVITVTAIKQGYEDWLRHKADSAMNQCPVHFIQHGKLVRKQSRKLRVGDIVMVKEDETFPCDLIFLSSNRADGTCHVTTASLDGESSHKEDYDGSDRMAQYPDRSETRGLVLFWAVSAAAVAASLGNAGVLLLCTPVKEMHPHVYLCTIPQTHYAVQDTKGFHTEADVDSLHATIECEQPQPDLYKFVGRINVYNDLNDPVVRESSAYADGLGCLQCVAIYTGMETKMALNYQSKSQKRSAVEKSMNTFLIVYLCILVSKALINTVLKYVWQSEPFRDEPWYNQKTESERQRNLFLRAFTDFLAFMVLFNYIIPVSMYVTVEMQKFLGSYFITWDEDMFDEEMGEGPLVNTSDLNEELGQVEYIFTDKTGTLTENNMAFKECCIEGHVYVPHVICNGQVLPDSSGIDMIDSSPGVSGREREELFFRAICLCHTVQVKDDHCGDDVDGPQKSPDAKSCVYISSSPDEVALVEGMQRLGFTYLRLKDNYMEILNRENDIERLLVRLCFLFLDHGEIYLFCKGADSSIFPRVIEGKVDQVRSRVERNAVIYLRCVKVTKPNQDRQHPSHCPGILRSILQLTREGLRTLCVAYKRLEPEQYEDACRLLQDAKVALQDREKKLAEAYEQIEKDLILLGATAVEDRLQEKAADTIEALQKAGIKVWVLTGDKMETASATCYACKLFRRSTQLLELTTKKLEEQSLHDVLFELSKTVLRCSGSLTRDSFSGYAAAHHMRPGSVAYECLHPCGSSGCCGLSTDMHDYGLIIDGAALSLIMKPREDGSSSGNYRELFLEICRNCSAVLCCRMAPLQKAQIVKLIKFSKEHPITLAIGDGANDVSMILEAHVGIGVIGKEGRQAARNSDYAIPKFKHLKKMLLVHGHFYYIRISELVQYFFYKTLYDTAYLTLYNISFTSLPILLYSLMEQHVGIDVLKRDPSLYRDIAKNALLRWRLFIYWTFLGVFDALVFFFGAYFMFENTTVTINGQIMTTNTSMACQQVCSIAEEASRVTPVLRAGHTDSHGYIQTQCSSSCPSAVGISVTRSRFPECVLEQTGRADLGDMMFGNWTFGTLVFTVMVSTVTLKLALDTHYWTWINHFVIWGSLLFYIVFSLLWGGIIWPFLSYQRMYYVFIYMLSSGPAWLGIILLVTVGLLPDVLKKVLCRQLWPTATERTQPSSNEPVQGRLFPSRGLCARCGQQSARLKALADATPNTDRPLLKDFLPQPRRV

SEQ ID NO: 22570 - protein, 1352 aa, Rattus norvegicus
MAMSLYEGPKTQLGLFIQLWKHQLTAVMHTVQRGKGVFKLVDSKAVSKLWGKRKNKPDMNYETMLQALRYTTKGEFLQRLKDRGLFKDMPQSIVVIDDDKSETCPEDLPSTCVSSSSSSKDSLCGNASPCGNDITGSKDFHCGSAVIKRPEVKSEAKKQEHDVKTLQLVEEKGADGNKTVTRVVVVSAPSAIALPVTMRTEGLATYTSVSVLLSFDIQARMNSPGYLIELDHLMKLYVNSDCTAKYSVLTFLPRFLYEQIRRAANAFFLFIALLQQIPDVSPTGRYTTLVPLVIILTIAGIKEIVEDFKRHKADNAVNKKKTIVLRNGMWHTIMWKEVAVGDIVKVLNGQYLPADMVLFSSSEPQGMCYVETANLDGETNLKIRQGLSHTADMQTREVLMKLSGRIECEGPNRHLYDFTGTLHLDGKSSVALGPDQILLRGTQLRNTQWVFGVVVYTGHDTKLMQIIYLRYIFRAQAKCNLYQNILIMSSMDKNSTKAPLKRSNVEKVTNVQILVLFGILLVMALVSSVGALFWNGSHGGKSWYIKKMDTTSDNFGYNLLTFIILYNNLIPISLLVTLEVVKYTQALFINWDTDMYYIENDTPAMARTSNLNEELGQVKYLFSDKTGTLTCNIMNFKKCSIAGVTYGHFPELAREQSSDDFWYPCPSQYLTSSQVPMSLTVPDIPYRYPCPSQYLTSSQVPMSLTVPDIITVPDIPYRYPCPSQYLTSSQVPMSLTVPDIPYRYPCPSQYLTSSQVPMSLTVPDIITVPDIITGTQCLSQYLTSSQVPMSLTVPDIITGTSSPLTVPDIITEVPMSLTVPDITQRYLMSLTVPDIITVPDIPQRYPCLSQYLTSLRGTSCPSQYLTSSQVPMSLTVPDIPHSRMTSCPSDSCDFNDPRLLKNIEDEHPTAPCIQEFLTLLAVCHTVVPEKDGDEIIYQASSPDEAALVKGAKKLGFVFTGRTPYSVIIEAMGQEQTFGILNVLEFSSDRKRMSVIVRMPSGQLRLYCKGALYTSTPNSEDSPNLKQFHSDNGYKAQSLNYGEDNVIFERLSKDSKYMEETLCHLEYFATEGLRTLCVAYADLSENEYEEWLKVYQEASIILKDRAQRLEECYEIIEKFLFEAWVLDMTELRSKSTGYSCRLVSQNMALILLKEDSLDIILSMRAVTVWFRNAVGELFIVRGLLFQLNTLRVQASHRKHPEPVFSKKIDPFSWTARPEIISFALDTSKLKTKSNKPKPVAGSTQFSVLTTQSAPQSPWLPHCNEQMDLTCFAKLIPSRLWLALFYASIKPVQNLPCVSPSTAVGFYMYHRPLLTKHNFSFSTSIYPHCLHSAARVGKRMGCPKVHALATCFKW

SEQ ID NO: 22571 - protein, 1613 aa, Rattus norvegicus
MREGRKRRKKKEDKKRVVVSNLPFEGWPYKENPNRHYQGNQVKTSKYTVLSFVPKNIFEQLHRFANLYFVGIVVLNFIPVLNAFQPEVSMVPVCVILTVTAIKDAWEDFRRYKSDKVINNRESLVYSRKEQSYMQKRWQDVRVGDFVQMRCNEIVPADILLLFSSDPSGVCHLETANLDGETNLKQRRVVKGFSQQEVQFQPEHFHSTIVCEKPNNHLSKFKGYMEHPDETRTGFGSESLLLRGCTIRNTEVAAGIVIYAGHETKAMLNNSGPRYKRSKIERRINTDIFFCIGLLFLMCLIGAVGHSLWNGTFKEHPPFDVPDADGNFLSPALGGFYMFLTMIILLQVLIPISLYVSIELVKLGQVFLLHNDLDLYDEETDLSIQCRALNITEDLGQIQYIFSDKTGTLTENKMVFRRCTIVGNEYCHQENDTAQPECNKDSFFTAKRLEMPKELDSDGEEWTQYQCLSFPPRWTQGPATIRSQGGAQPLRRCHSARVPIQSHSRQRSVGRWETSQPPVAFSSSIEKDVTPDKNLLSKVRDAALWLETLDTRPAKPSHSTTASIADFFLALTICNSVMVSTTTEPRKRVTTPPANKALGTSLEKIQHLFQRLKLLSLSQSFSSTAPSDTDLGESLGPNVPTIDADEKDDASVCSGDCSTDGGYRSSTWEQGDNLGSESGTSLEEGLEAPALSLDGPELCYEAESPDEAALVHAARAYSFTLVSRTPEQVTVRLPQGICLTFDLLFTLGFDSVRKRMSVVVRHPLTGEIVVYTKGADSVIMDLLEDPACVNQKDSRKLRVKLPEHLPMASWGNNNYLTGNDIDVEKKLKRIRARTQKHLDLYARDGLRTLCIAKKVVNEEDFQRWASFRREAEASLDNREELLMETAQHLENRLTLLGATGIEDRLQEGVPDTIAALREAGIQLWVLTGDKQETAVNVAHSCKLLDQADTVYSINTENQEAGMENEVRNVESECIPCQWSRDGIQQTWIKGAIYPWVSWKREPGNIVYTMGKEEQKGRRGCLLIRDYMTLQETCESILNCALEDVKRFHEPQQPARKLCGYCIPSKKPSVNLGAMAPEIGLVIDGKTLNAIFQGKLENKFLELTQYCRSVLCCRSTPLQKSMIVKLVRDKLSVMTLSIGDGANDVSMIQAADIGIGISGQEGMQAVMSSDFAIARFSHLKKLLLVHGHWCYSRLARMVVYYFYKNVCYVNLLFWYQFFCGFSGSTMIDYWQMIFFNLFFTSLPPIVFGILDKDVSAETLLALPELYKSGQNSEPCWLPNEVLQYIAYREREERREKREEQCYNLPTFWVSMADAFYQSLICFFIPYLTYRGSDIDVFTFGTPINTISLTTILLHQAMEMKTWGCRYLLRALKEHLHSNDSYTYSMTRVMQVNHSVLLFDVLRGFPNIQRHLRHLQQPYQSLLVDGKAALRPHVLPHLSPHSSRGSSTKPRSKFSTWKYGGGSISSSQENEGVSQARCPCHHFWFRPHYASGREVQLYRKTEASCNRISERHAKGRQLPLLHAAATVRPWGTHPCEGVKSLEKQAEWTVLGGVQKTGSLLERRTGRTAPWVTENKSSLRELKTTRVTFGNESSSIPTRFQNLSGAEFKSGFIIAG

SEQ ID NO: 22572 - protein, 831 aa, Rattus norvegicus
MSFLMALLTQCAGEEKRVGTRTVFVGNHPISGTEAYIAQRFCDNRIVSSKVTVDTPTSPVTSGLPLFFVITVTAIKQGYEDWLRHRADNEVNKSTVYIIENAKRVRKESEKIKVGDVVEVQADETFPCDLILLSSCTTDGTCYVTTASLDGESNCKTHYAVRDTIELCTAESIDNLRAAIECEQPQPDLYKFVGRISIYSNSIEAVARSLGPENLLLKGATLKNTKKIYGVAVYTGMETKMALNYQGKSQKRSAVEKSINAFLIVNLFILLTKAAVCTTLKYVWQSTPYNDEPWYNQKTQKERETFKVLKMFTDFLSFMVLFNFIIPVSMYVTVEMQKFLGSFFISWDKDFFDEEINEGALVNTSDLNEELGQVDYVFTDKTGTLTENSMEFIECCIDGHKYKGTTQEVDGLSQIDGPLAYFDKADKNREELFLRALCLCHTVEIKTNDAVDGPIEGAQFTYISSSPDEIALVKGAQKVHSHEIDLTKVHVERNAMDGYRTLCVAFKEIPPDDFERINVQLIEAKMALQDREEKLEKIFDVIETNMNLIGATAVEDKPLMGVFALDGSRPSGLYVRDLQVCLVQELQIRSKLQDQAAETIEALHAAGLKVWVLTGDKMETAKSTCYACRLFQTNTELLELTTKTIEESERKEDRLHELLIEYRKKLLHEFPKSTRSLKNLLEQHINIDALTADPRLYMKITGNAMLQLGPFLYWTFLAAFEGTVFFFGTYFLFQTTSLEDNGKAFSETTENVFCVCSNALFCIYMVGYNSFNIYQPFPRDSPNSSKECAKKECQVLLNLCVASSPVSQQETSTKENSLDVLLTSLLFGTHL

SEQ ID NO: 22573 - protein, 1281 aa, Rattus norvegicus
MEAFHGKIVQLTENSLDATKILDARGRQVMSRLVFYTGSKDNVYDIEDEELYNLEGPGSSRSDAHNCSTNASFPLQWLWYFNTHAPGCSEQQQTKQTYQAKETNLKVRQALPVTSELGADISSLAKFDGIVICEAPNNKLDRFSGVLSWKDSKHTLSNQKIILRGCVLRNTSWCFGMVLFAGPDTKLMQNSGKTKFKRTSIDRLMNTLVLWNVCFSNSGSDGDIKIWYTFSPCLPLISKNKLSTSQGALARPPPPPVLMSISLPNDSLGHHTFIHAFFKVIQHPTCNKCLQEERRRHDANTNVDICTLIHMKDVTKGFGSGGQGNAIGNVPHSPKQAKAHKCHVRSEKKEAVDFSGKSKSERTLHFFDHSLMESIELGDPKVHEFLRLLALCHTVMSEEDSAGQLVYQVQSPDEGALVTAARNFGFIFKSRTPETITIEELGTPVTYQLLAFLDFNNIRKRMSVIVRNPEGQIKLYSKGADTILFEKLHPSNEDLLSLTSDHLSEFAGEGLRTLAIAYRELDDKYFKMWQKMLEDANSAIAERDERISGLYEEIERDLMLLGATAVEDKLQEGVIETITSLSLANIKIWILTGDKQGGFENQMRHHGFLDELESSSVNGKFGYGSQVSGFFPGQLYYRKETAINIGYACNVLTDAMDAVFVITGNTAVEVREELRSCSRSSQKQGMSLSKETAPDFIGTSGEGIVELILHDFIQLQLVGYTDVTAVISQKKCGGMKAKENLLGQNTSFSNGHAVYENKQRLELDSGAGETVTGEYALVINGHSLAHALESDVEKDLLELACVCKTVVCCRVTPLQKAQVVELVKKHRNAVTLAIGDGANDVSMIKSAHIGIGISGQEGLQAVLASDYALAQFRYLQRLLLVHGRWSYYRMCKFLCYFFYKNFAFTLVHFWFAFYCGFSAQTVYDQWFITLFNIVYTSLPVLAMGVFDQDVSEQNSMDCPQLYEPGQLNLLFNKRRFFICVAHGIYTSLILFFIPYGAFYNVAAEDGQHIADYQSFAVTVATSLVIVVSVQIALDTSYWTVVNHVFIWGSVATYFSILLAMHSDGVFGIFPRQFPFVGNARRSLSQKFVWLVVLLTAVTSVMPVVVFRFLKMHLYPSLSDQIRRWQKAQRKERPLRSRRPQTRRSSSRRSGYAFAHQEGYGELITSGKNMRAKSPAPTSGLEKMLYSNTSWIGNLCKKTTDVVSGFSHDKTVKLKSQTFAIVEAKPSAELSGSQGYLALVFPSAHFNRLGGLLGETRGLQLRFNQEGDLSALKFQNSLGDLF

SEQ ID NO: 22574 - protein, 279 aa, Rattus norvegicus
MCYIETSNLDGETNLKIRQGLPATSDIKDIDSLMRISGRIECESPNRHLYDFVGNIRLDGHGACLPDRWAVQGILDYVTSNASILYPSTVPLGADQILLRGAQLRNTQWVHGIVVYTGHDTKLMQNSTSPPLKLSNVERITNVQILILFCILIAMSLVCSVGSAIWNRRHSGKDWYLHLHYGGASNFGLNFLTFIILFNNLIPISLLVTLEVVKFTQAYFINWDLDMHYEPTDTAAMARTSNLNEELGQVKYIFSDKTGTLTCNVMQFKKCTIAGVAYG

SEQ ID NO: 22575 - protein, 646 aa, Rattus norvegicus
MVSLPSRTYIEMCKRYTECLKSTWCSFPVVQQLRLWTLECNSDFPLTIWVVLTIFEVNKKASRALTKSQTESTSRAPALSSAGILLQSAWNQRLPQIDGGGKAFPILVRFGISKAFPWSRVGMLTVRVSINCQFSVERATAKYVFQHIGECRNQSCYDERTGTVHLQGWRCRCLQPRVRVVVSSSVHLGDAPALLCSQLSSAVTCCWSADSQRPQPHVYKWTRCAYPIGQQEHVGAHGGGGRVGFKDEYERFSGTYVNNRIRTTKYTLLNFVPRNLFEQFHRAANLYFLFLVVLNWVPLVEAFQKEITMLPLVVVLTIIAIKDGLEDYRKYKIDKQINNLITKVYSRKEKKYIDCCWKNVTVGDFIRLSCNEIIPADMVLLFSTDPDGICHIETSGLDGESNLKQRQVVRGYAEQFSQVTASVILKRALTQVSKCVKVEGKVEHSNKERVGLSKENLLLRGCTIRNTEAVVGIVVYAGHETKAMLNNSGPRYKRSHGIWLSRYENMLFFNIPEPDGRVLSPVLTGFYVFWTMIILLQVLIPISLYVSIEIVKLGQIYFIQSDVEFYNEKMDSTIQCRALNITEDLGQIQYLFSDKTGTLTENKMVFRRCSVAGFDYCHEENEPRLSDLKPMQVVGHERVSEYLRRK

SEQ ID NO: 22576 - protein, 1501 aa, Magnaporthe grisea
MVSIVSHKAKAPSKESLATDIEPGNPPTAPRQVGARQRASDWFAKVSQEGLFHKPLPPSKDGRHVPIRFAGSQDGDKATHLIDERRGHGYLSNAIRTSRYTLYDFFPKQVWFQFSRLSNFYFLCVGIPQTIPGISTTGNFTTILPLLFFVLLTIVKEGYDDYKRHRLDKVENARCATVLRRASGADEVLETQRQSGWPLPHFLGKHFQQKSWEDRREPAGEGWEWRTVQWRDIEVGDVLRLSRNEDVPADLILVQAENEDHIAYVETMALDGETNLKSKSVPANLTKLASISDIVQSGLEIVAEDPNPDLHNFDGRLTIAGDTAPLTINEVLYRGCTLRNTPAAVGVVINTGEECKIRMNANRHPKAKKPALEKTTNRIVLTLVAYVFSCTAGCSIGYLLWQRSTENSSWYLRGAGVAVQEIVVGYAIHFNNIIPLSLYVTLELTKLFQMLMLNGDIEMYHEASDTPAKCNTNTILENLGQVGYVFSDKTGTLTENVMQFRKMSIAGISWLHDAGLQKPDGLSPVSTSVQVISPTSSNREMAVPTVVMSHQPERRSFVIPEDSEIPYDVPRGRPQETEMFPRRSGLSATSPRRSSLQWRSSGRPDLEQPGLSSADLMEYIRHRPNSAFARAATDYLLALALCHTCLPEYSDDGIDYQSASPDELALVRAAQELGYQVVQRSSHSVTLRLGSTNGGEDTREVVYEILDVVEFSSKRKRMSIIIRCPDGRILLICKGADSVILPRLRQANLALQKVQEVRQSVEVEKEALRHSEAREPRNSLGGRPSLDLRRHGGYADAGLSGPFAKRPSMSDRSKSFEAHSRARRSADLVRPSLQLRTMSFDLKRSRNDPSGSALLSAPALTQLPAKFEVLEDPSVNDDGVVFTRCFKHLDDFASEGLRTLVYAQKFLSESDYASWKKLYSDATTSLVDRQERIETVSELLEQNLELVGATAIEDKLQKGVPETIDKLRRANIKVWMLTGDKRETAINIAHSARICKPYSDVHILDSSKGNIEGQLAGIIEELREQKNSNGLVPSFQNNHNVLVVDGHTLGEMEPSVHLSELFYSLAPVVDSVICCRASPAQKALLVRAVRQKIIQSTPSGKSATRGDTLLTLSIGDGGNDLAMLAEAHVGVGISGREGLQAARVADYSIAQFRFLARLLLVHGRWNYSRTARFVLATFWKEMYFYTGTIAYQYFVGYTGTSLYEMWSLTALNLLFTSLCTISPALWEQDLSATTLLAVPELYTFGQRNLGLDVTKYLSWMLAGVAEGLITFFSCWASVGVFGLTGDIGLYAIGNLAFSIAMMWTNWKLLIIETHTKNIVILGSFLITVAGWWAWQAFLSGSYSPSPSPYAVRGGLTEGFGRDLSWWTCLIVVLAALIVFEMGYKAVKRQLVVGGALRKRQRKAKRVLGRILHRVLCGLFVSTGVAAAAGIKTGDAQADDLRRQEALENEEDLDLELWQELEQDPEVRARLEGLCWVEDEEENVGDDDEDNAEEVQVGRTGA

SEQ ID NO: 22577 - protein, 1501 aa, Magnaporthe grisea
MVSIVSHKAKAPSKESLATDIEPGNPPTAPRQVGARQRASDWFAKVSQEGLFHKPLPPSKDGRHVPIRFAGSQDGDKATHLIDERRGHGYLSNAIRTSRYTLYDFFPKQVWFQFSRLSNFYFLCVGIPQTIPGISTTGNFTTILPLLFFVLLTIVKEGYDDYKRHRLDKVENARCATVLRRASGADEVLETQRQSGWPLPHFLGKHFQQKSWEDRREPAGEGWEWRTVQWRDIEVGDVLRLSRNEDVPADLILVQAENEDHIAYVETMALDGETNLKSKSVPANLTKLASISDIVQSGLEIVAEDPNPDLHNFDGRLTIAGDTAPLTINEVLYRGCTLRNTPAAVGVVINTGEECKIRMNANRHPKAKKPALEKTTNRIVLTLVAYVFSCTAGCSIGYLLWQRSTENSSWYLRGAGVAVQEIVVGYAIHFNNIIPLSLYVTLELTKLFQMLMLNGDIEMYDEASDTPAKCNTNTILENLGQVGYVFSDKTGTLTENVMQFRKMSIAGISWLHDAGLQKPDGLSPVSTSVQVISPTVSNREMAVPTVVMSHQPERRSFVIPEDSEIPYDVPRGRPQETEMFPRRSGLSATSPRRSSLQWRSSGRPDLEQPGLSSADLIEYIRHRPNSAFARAATDYLLALALCHTCLPEYNDDGIDYQSASPDELALVRAAQELGYQVVQRSSHSVTLRLGSTNGGEDTREVVYEILDVVEFSSKRKRMSIIIRCPDGRILLICKGADSVILPRLRQANLALQKVQEVRQSVEVEKEALRHSEAREPRNSLGGRPSLDLRRHGGYADAGLSGTFAKRPSMSDRSKSFEAHSRARRSADLVRPSLQLRTMSFDLKRSRNDPSGSALLSAPALTQLPAKFEVLEDPSVNDDGVVFTRCFKHLDDFASEGLRTLVYAQKFLSESDYASWKKLYSDATTSLVDRQERIETVSELLEQNLELVGATAIEDKLQKGVPETIDKLRRANIKVWMLTGDKRETAINIAHSARICKPYSDVHILDSSKGNIEGQLAGIIEELREQKNSNGLVPSFQNNHNVLVVDGHTLGEMEPSVHLSELFYSLAPVVDSVICCRASPAQKALLVRAVRQKIIQSTPSGKSATRGDTLLTLSIGDGGNDLAMLAEAHVGVGISGREGLQAARVADYSIAQFRFLARLLLVHGRWNYSRTARFVLATFWKEMYFYTGTIAYQYFVGYTGTSLYEMWSLTALNLLFTSLCTISPALWEQDLSATTLLAVPELYTFGQRNLGLDVTKYLSWMLAGVAEGLITFFSCWASVGVFGLTGDIGLYAIGNLAFSIAMMWTNWKLLIIETHTKNIVILGSFLITVAGWWAWQAFLSGSYSPSPSPYAVRGGLTEGFGRDLSWWTCLIVVLAALIVFEMGYKAVKRQLVVGGALRKRQRKAKRVLGRILHRVLCGLFVSTGVAAAAGIKTGDAQADDLRRQEALENEEDLDLELWQELEQDPEVRARLEGLCWVEDEEENVGDDDEDNAEEVQVGRTGA

SEQ ID NO: 22578 - protein, 1142 aa, Anopheles gambiae str. PEST
DDATTSGITLDDSDKRVIRLNEPQVQKYCNNHISTAKYSVLSFLPSFLFEQFRRYSNCFFLLIALLQQIPDVSPTGRYTTLVPLMFILAVSAIKEIVEDIKRHRADDEINHRLIEVLQNGQWHTIKWQELSVGDIVKVLNNTFFPADLVLLSSSEPQGMSFIETSNLDGETNLKIRQGVPTTSRILETKDFSQFRGTLESEPPNRHLYEFNGVLKEHDKQAVGLGPDQLLLRGAMLRNTAWIFGIVIYTGHDTKLMRNSTSAPLKRSTVDRLTNTQILMLFIILIILCIVSCIFNQLWTKRHFQTDWYLGIGNLLNKNFAYNLLTFIILYNNLIPISLQVTLELVRFLQAIFINMDIDMYHAESDTPAMARTSNLNEELGMVKYVFSDKTGTLTRNVMEFKKCSVAGSIYSIEDTPAHFRLRKTTIEWDKTYHFQLITIRSHPFQNILNNHRTAPTLREFLTLMAICHTVIPEKQPGDSMNDIQYHAASPDERALVYGAKKFGYVFYTRTPTYVEIEALGVQERFEILNVLEFTSTRKRMSVIARNSKSEIKLYCKGADTVIYERLAPEGVAYRESTLSHLEEFATEGLRTLCCAVSDIPDDVYEDWKHTYHKASTSLQYREQKVEDAANLIETNLRLLGATAIEDKLQDGVPETIASLLEAKINVWVLTGDKQETAINIGYSCQLLSHSMDLILLNQDCLDNTRSCILEHTSNGRFDNVGRKDAALIVDGKTLKYALSCDLRREFLDLCISCKVVICCRVSPIQKAEMVDLVTISTKSVTLAIGDGANDVAMIQKANVGVGISGVEGLQAACASDYSIAQFSYLRKLLLVHGAWNYSRMCKLILYSFYKNICLYVIELWFAIYSGWSGQILFERWTIGLYNVFFTALPPFAMGLFDKVTSAEQMLKEPRLYAPSQNAKLFNVKVFWRCIINALFHSMILFWLSYKIYEKDVIWKNGRDGGYLVLGNIVYTYVVVTVCLKAGLLTNSWTWLTHCSIWGSILLWFIFIFIYSNIWPALPVGAVFTGMDDMVFTTPVFWAGLLLIPLSALLFDVSWNAICGVLICFNQQQKKTNKQNQTPNYYRLTETARLLRNVRRVFTGRSHTTENKELELKHGYAFSQEEGGSVTQTDVIRAYDTNLPKPD

SEQ ID NO: 22579 - protein, 971 aa, Anopheles gambiae str. PEST
NRIKSTKYTLITFLPLNLFEQFRRIANLYFLFMTVISIVIDSPVSPMTSLVPLVFVIAVTAAKQGYECFLRYRADNMVNFSPVTVIRGGVTVDIRCQDIRRGDIVLMSRDCDIPCDVVLLQSSDEHGRCYVTTANLDGETNLKTMAAPKGVPVVPPDRLHTIGRIEYERPHTDLYSFNGRIELADAYVAAGDHSVLPLATENLLLRGSRIRNTEWAIGCAVYTGQQTKLALNSRMTTSKMSSSERYVNKYLVFFLVLLVVIVTMAKFLGGFYLEWDPDLYDEETDQPCIVNTSDINEELGQVSLLFSDKTGTLTKNIMIFQQCSIAGRKYEQQGRRLLEAGDRRAALKINELPVTTLHFVAFGHLFFDVFFVVCLPQTQVNEFFQALAVCHTVQVAGDYTKETEEDATSPAKEAKETDVLMEDKMDYQASSPDEKALVEACARMGLVYIGDDGDQMQIKVRRSCVRANVRSRLGEIPDEELIQYERLAVLEFTSDRKRMSIIVRDAHGQIWLYTKGAESHVLPLCAHTPLIETTQRHIDEFAKLGLRTLAVARRRLTEQQYRTFHDELIEAGSSLVDRVERVAECQQRVETELELLGATAVEDALQDDVQSTLQALGQAGIRVWVLTGDKVETALNIALSCGHIPDGAARYFITECRTAEQVQQHLDTLALEMFRQRDVPFSMLIDGASLKIALEAHREQFRDVSVRCRAVLCCRLSPLQKSEVVQLMKTAEGAPVTAAIGDGANDVSMIQEAHVGLGIVGREGRQAARCADYAFAKFCMLKKLLLVHGHYFSTRLAVLVLYFFYKNLVFMGIQLYFQIHSLFSNQSVYDSVFLTLYNVVYTAIPVLVLALTEKPYQEQTLLKNPALYQKVAGNKQYAWKYFIGWMVLGIYHFSVIYFFSYAVWIENPAIYAHWPATASFACYGTILIHNVVVLVNLKLLIESIYKSYVFIATVLLSIFAFMGSTFVYNLL

SEQ ID NO: 22580 - protein, 1284 aa, Giardia lamblia ATCC 50803
MGCCCCRPIEGEEEDITLRFRGLAVNYGGRKFLPNVIKTRTYNWISFPFIVLLLQFKPFFSQFFTAVALLQIFRALKVGLAFTYYLPLIFIFLVSIGRELYTELGCYKRDKIANSMLYQILSDSGIRTVRSDELQVGDIIYLAPGQNIPADILILHGTEPLYLKTTNLDGETDYKSRTACFDTTDIYSTDYKDILRKKLDSHILQYEPPSSQLYKFNGKFVLLSAPQDVSMSPVMPISLANTAWMNCTLAKGSVTGLVIYTGKQVRIMLGRKKPKSKSGKLDVDINLYVKGLFVLCIFLAFVLTMAGSVYSLVTFIRWIIILNAIIPLAMKVSLEYGKFTMAGTISYDPEIPGVRVQNSNLVEELGLINHIFSDKTGTLTKNDMWLHEVVGSNKNVTDGCETMLHALMTCHNVELVTERCRSIKVTAKNGIVQHSDQDSEEDQAKQLVPQKTNTRIVLEEEKVIEGFGEAVSLCFTKHTTNEYLLLNNYIGASPDEVAIIRGMHARGHILKEKMHNRIQYSSGTEDYEFELIHVFPFTSETRRMSVIVRDRETQVVYLFVKGADTAIEVISKPCDWMRNVVDQLATTGRRTLVYAYRILSADDLDAFQRAWMSAAEDINSRQDKLDQAEEDLLVNLDVLCVTGIEDQLQDNVKDTIQSLKRAGIKFWMLTGDKIITSLSIAQACSILPNDVISKHTDFCSRVSEIGNSTSRCVELDAQTGDVQHSLHIVGENTSSSAMQLASVASNPITMSPLDPVLITTTCAQERSHSCSSPKSGLRSPLHHRTNRALLRHPLKKSGLRNKKLANIKESAYVRKSQGVFFLTEELSLDRLLQTLHDVLAVVETQKNIAIIIDGGAIDALLGTYPTNYFYRYRIHPITGSLLPLPLILKAWRYFVRFLYVYFTGKAKSGKGSLGPDAKIRELFAEVTCRAETVICCRCTPGQKALVSEIITTYSGKQSLGIGDGANDVPLIQLCAVGVGIAGKEGTQAANSADFVINEFQGLKKLLLWHGRNSYIGSAQMCQFIMQRGITQTLLQIWFSMLYYFVTLVIYTGVLLLGFATFFTMLPPFNYYINEDIDYKLVMQYPEVYRYTSSGRLISFKTFCLWLLASIVISFMIFVSLVCVLPWDVIYTEFVLVSFAALLINQLLLISFTSHRWSVLLVITLVGSYASFYIVQTIYPDIFPLSFLYSFSFTWSSLYIAFSAALPIYIGSLLVKHLSVPPVIKKLRKLRAPADCACCAKKSNCACTKSPIHYYSSTGTYYFNLTDKAANVLTCRYCSTCPRKC

SEQ ID NO: 22581 - protein, 1309 aa, Giardia lamblia ATCC 50803
MIADHPATCYTCDANATVARQVVPIYEDLAACEQGGNVKASRERGKKRKQGTVHKVRINYYPLSQRSSNKFRSSPYTPLNFVPLFLKAQFSRPSNVIFVGIMILNYMPGITIVSKATAVIPVVFILATSLLKDLIELGIRIKNDKVINKAEYGEHISGGKVCSTVEAQNINPGDIFKITAGQTAPCDVLVLASDKNVVYFSQSSLTGEQNLVQKNPIYTSTDIISSQFIGDVEFSFYQGKVFGCYTGPAVEENTQGYVSTAPDLHAAPVSVCIEDVQAIQRARERRYRNAAMSTHHIQMNSVVKRASMGKRPIQPEPIVHSILLNQGNVGFKGTAATTDYYALALATGENCMSTYTAHKRESRISNGAKRLQLIIIVQCSLVLVFVISFSSVVTERYQGYIERYPYLEIADQFASKAGAFFISFVSYIILFSYALPICIFVTIELLNILNRLFVRSDLNLIHLYGSCTVNNDKVLADLSRITHIFTDKTGTLTRNQFTYHSFLGVDECRRLSTESILKSIYALGENRANDADLNVFYGNYASQTPQHTVDTIQNRVLQLVALGLCNSLIPVKSNGRLEYFGESVEETCYIRYLSTNGILSIVEKTESTVRLALSRSFIETGNVSSARIQTVRLSNTFESVISDDYSIDKYVLLDFELLKVYEFTPSLKRMSVICCQKASHETTSCSMYVVNGMRPFLITKGSHVVMGQLMNRIPMAEGEQSTEQPQSLSIENIITKNLADKRCFVFAFKPFPTLPNVKTEPQQSVEQGSNFLGISVIEDELAPNVLESVKKLRFAGIKINIVTGDSIETTIETAARTGIIDVDTNKVIITRMDEIAVRKAELQDEEDQRYCLVVSGEVINEVFPNLERRAQINAFLRKGKLPKKFARQYFKDTGVECSHEPKVSLDLMYLISQANACLFCSMSPESKKVVIQYHSVYISLQKTRIKLWCRGKSPSVGASLAIGDGQNDLQMIDAADVSVGVRGREGLYVANNADVSVPSFSTLVRLILVHGVLIEQRMRMTIFYNLYKNTMLAIICGFYSGESLFSSVLIINDFLSLMYNVILNFIPIFIYALSEQHVKPRYLENFPTIYRTNCQPWRYWFEFVTFYVSGIYMAVIIYFCTAFMFGNSAILGTSGRVADTTVFSFIIITVITFVSLARLMIASNYYSTAFAWSIILSIALYYFTLVGINYTFFFTQYFFNTLTVASASLSYYLQCLVMIIFCLVPDIIYSTLSRLYINPDPNSLLTHYFKKETKGLGKRKDIQLELRYKRCLEEVIRSIQTTAKSSKEQSQNAIFCTESLEVDVKQEYN

SEQ ID NO: 22582 - protein, 1560 aa, Giardia lamblia ATCC 50803
MARPKCCKCNSLCCKRSSKRTSSASGDKQNAILFNFFDEGIAKTNHISTCKYTWYNFIFKFLIEQYQRPNNIFFLTVLLCNSIPGLAIVGFGTLITPVIFILVISAVREIIEDIGRSRSDKISNSKVYKIVRKGEVLSLPASKISQGDLVIIRDGDEVPADCLLMISSSQTKTAMVNTASLDGESNLKPRNVILTHLSPYNNELELLSFLRTLWGRITAYPPNSNLTLFTGKVSYHWSPYGIGFHDPGARAGTANDFAARLAIKSMALYAPPPAVAGGYSGVNKTPGNLKSMASPFSAVYVSARYPSYQPSSPSAQDTVPGTGPLGVRADNLLSTAGISNIAENSEDGDSILNDASVGNSSHTFVKPTSGCAGSLAIDLDLAVTSSEPTEVAKDLTSSHGFSIDKLDSVVPRVTSISSKASRDSPVDQAGRDMATRSSITTTPRTGFAASVAQACDRANGELPLTETLDLVSAFPLTNLAAGPNYTTDNTHKLLHFNTDNTLLKGMKLQNTELAVGAVIYTAYDTRLMMNQTKPPLKLSHVQKRLDRVLLLEILFLVAGVIICGAIAAATNGDYLTRYPYAGFPNTKKFGTFLMRGMSYAVLFSYALPMSLFVSLELVRLVQGIFIEMDTRLRKAELLPQLDKRAYDPLPPAKVHCVVKASALIEDLAEVDIIFSDKTGTLTSNEMIFHSFYTLFDGVQCVYDTVIAAGKLELCTISHSTLVLEAKEEKNHVSDLMTYALALCNTIIVSDKGGTLVYQGESPDEIAFAKAAAAFRLVITGREAEYVRYNYSFSLNEDSVAPRQVSVPVTYTFPVVVPFTSARKRMSIVLCEEGIEPSEHFTSMIAPYLVNGSPCPTPDPKDVVCFPRFSYSRSKRRVFFTPIQLCTVPGNPFLLSKGADSFLLPYCKPILGENPMNLPPIKAAIDNFSCEGLRTLVWAVRELSPGFLDNFLKTWREVSIKPDSDPEYISHTKRLERDLTFLAASAIEDRLADMVPETLATLLSAGIKVWMLTGDKTQTAVNIARSSNLAPAESEWLYLTHEEVTLMEEKLKQGEVVAPPISEFVLEKLEKSPTKNKLLALITLLDAFEKRVSPTVIKERRKLIHRRVEDAAEYNTYDTSEHPQDRKPSGAQQPTSDVSSVKQKFTKFGRQLKDAFSFTELYRKKKEYKTTVPFTTVIDSDVFKLIYMNNLHDFLLSVTMHSTAVVCCRLSPEEKALIVTMTRNRDKYITTLAIGDGANDCPMIKSANIGVGIAGNEGLHASNSSDFSLPEFKYLRRLLFVHGHYTHLRNSELIEYCIYKNLILVFVNGLFSGQCLFTSQILFNDMMVTMYNIVLTFFPIFIYALTEHDIKDRVLEVHPRVYSVFEKKPETNIKSIGLRILIAFYHSLCMYFLTRFAISYNVTEMNGHNIDLTLFGYYLLNELIFIVTIKICLQTKYWSWATLIALIFTVTVFVILLLLTNYTTIITETLLNTMSFASHTLHFWVTVSSVVFAALLPDVMYTFIRRFYFPNSHDLLYHQYRHLKRNCLGHALDVGRDIERVEKMDNCLEEVQARLRQSDQV

SEQ ID NO: 22583 - protein, 1432 aa, Giardia lamblia ATCC 50803
MPPELQKSELFEDYSRIEALVNAHNDQLAKQKEEEVALALKKRVSEIDDKPVIAPVAGPLALAQPIVPFNRRREDSAPLLPYTTMDSELKQPKRTSLVRRLKSKGSYYLANSKRALRIGKKYKAGGRRRPEKTYPARSIFLNSHVSHPSPKNLLKNNKYNIITFVPKILYQQFKYFFNLYFLGITISQSIPILRVGFLFTYLAPLVLVLAVTMIKEFVDDIQRVIRDRAVNREKYHRLRSDAVSVNDVEQVLAQDIRVGDILVLRSGQRVPTDCVILHLQNDGNSVEECFIKTDQLDGETDWKMRKALNFTQGKGIEYLRDVQTRAIFEIEAAHKDIYGFKGRANYVSSDNSVITESISLENTIWSSTVIASPSTTVALVVYVGSESKTRLNTNAPRVKMGFFDKEIDMRAMNLFWIQFFGAALYSWLGGNSPWTSVYYVIFFRYLLLFSSVIPISLRVNLDLAKIITSLMIRRDKSMQNPIVRTTTIPEQLGRIGYIMSDKTGTLTQNIMTFRSLHTGKSSYETLTEDDYGSFRMALKRAYRSQADVSRDPDMSIPAGVASMQHSSLPIHGQAFGNEQITMRRQVHGNVYSLIPQMKTSSVSNINDEQKALITALRMMALCNTVVPIERSAAQDDADFLIDDATIAMWSSRHLQSLAASDSAPSSTEVMRALQKNHLVQISTSSNCPPGIGGGINPDISYYTLQASSPDEISLVKLAAELNLTLMHRDRTSIVLQNPLGEPEEYTILYTFPFTSTTKRMDIVLESHLTGEILVLMKGADSVVIAASNPSPWASEQVSTLASKGLRTLVFAQRTMTRDELSAFASLYKTANEALDDRQKHIDDAENSILHSMDIVAATGVEDKLQEDVKLTIQQLRDAEIRIFLLTGDKSDTSMCIARSTNLVSPNQRFHEITLATYAAAVSGTAGTKGSYSGMEVFTKDSCGPSGRSTENSISVTMGTAGNASSGNAGSTDVSNTRLLEYISSELNKIADSGYECAVIIDGTILSEIMKTLPDSSLKEFRGEVVTKEELQHEKELDLATRTQSRGSRSGRAGCCGKDRNSKFGSSVAKQFITTIARCPAFVCSRCSPEQKSIITKMVANLHMEHMCCNPRCRCGAPKVGVLAIGDGGNDVSMIQSAAVGVGLVGKEGKQASLASDFSLDRFKDLSSLLLYHGRLNYIRGYAMAHYVFSRGMTISVMQAVFSALFAFSTIPLFTGWLMLGYTVVFTSLPVTIICFDHDLPKDYLVRRYPILYKDSQRNKHGLVSCFFKWLCVSIFQGSVLLMFSQFLINGGLHGSLDDGANFFNLVGTGYTSLLITELLTLGIGIYEWSPFMVGSGILSFAIYVAAMFIMPEYFDKRSIVTLTFWFRVVLGACAAVFPPFFLKWIRMRISPTDAEKLRRQWLVDRRRERNTKCCKRAGSLTETSMKGNDDPL

SEQ ID NO: 22584 - protein, 1555 aa, Plasmodium falciparum 3D7
MSLVYRKTLNFLKGKNEDDKDVKININGENKRTCNNSVITSKYTVFNFIFLNMYEQFHKISNVYFFFIGILQVIPQFTATNGIPTVFFPLLIVLTANAIKDAFEDWNRHKTDKIENNRMCYGIVSEEEKKIYQEKSNKKNIFKKLKRYFFGNRKICNTENYYDEDDMCDDEITDINDYINNYEDNLENIEGTVKKRWKDIKAGDIILCRRSEFFCADILLLCTSHKNGIAFVETSSLDGETNLKVKEANTFLFNILGNDRNSAIDNVKNLKGFILSDKPNKDLSTMYGTIYFEKDKKIDVENIGIQELLKKTTEEIEYRKKRLSSVDLSKSSSAIGSNLCNNNNKSDSKSDIKNYNKDDDDFDDMDENNILKNDNYIRIPFDEKQFVLRGCKLKNTDWIMGIVIYVGRETKIQMNSSKSIKKTSKLEILTNKMTIIIWVIQMIICLISAYYNAIIVSSSRKNRFRYLPFNLEKAKKPYIVGIISFFSWVVITGNFVPISLIVTMSFVKVVQAYFISCDKNMIHKVQADVPSFGEQKEIPNIPKDDISSDADVIKRMRTKKIADSSLLHIDENQTEEDNMDMKSDCIAFKNNSSHQNINGNNKQYSSSSLGIISNAPKREISSRVISFKDSKEKNYIYFNAVPRTSSLIEELGQIEYIFSDKTGTLTCNIMEFRKCAINGISYGKGLTEIKRNILKKKNLEIPVEPTMKFKKKTPHVNIIDNDIINHLKDPNHFNHVNLINFFLHLAINHAVICEKDKEGVTTYSSSSPDEEALVNAAKHFDITFLYRREGKYGISIFGKIYEIDTLATIEFTSKRKMSSVICRIPVINPDYNHPTDAKSSNMDKKKNNMDDHLVVGKNEEKEETDDLNVYPPKKEAHSKLNNNNNNNNNNNIRIDNLYDDKNNFNIIYNHNEGRTPEVITCKNSKNSKIMLFCKGAGSIILKKLAKRTDVDEITIEHMETYADEGLRTLCIAQRELSEESFAEWYHLYKEASLSIKDREEKLESVAEYIENDLILQGITGIEDKLQEGVSSTIEDLRMAGIHIWMLTGDKIETAMNIGIAANLIDNYSEQFIYTEEYIESEEALIKKIDDDILMVEKSLNIPHYNFDDENNNVEDEKRKTFFRNNFIKNFFCAKNKSGLLLNPDKYNMLINTLNYVLVVDGSVIDLLLSEKMERKFFYLADKCSSVICGRVSPYQKGAIVSSANRLLNKITLAIGDGANDRNMINTANIGIGIRGQEGVQAFNSSDYGISQFRFLKNLLLVHGRLSYRRISKLVVYMFYKNMVLIFPLFIFGSISLYSGQKIYFEFLLHLFNVLFTAIPVVIHAVLDQDISLNTAMEKPNLYKLGIHHYYFNIRTFISWVMNSLFHGSVVFLIPLYFLSYYNIPTSDGIPYDIWTVGCATYFLTVLIVNFKILFETYYLNILPISGIALSIFSFVLLVTAFSFMCVGSIHLLGTIVYLVQSLRFWLVVILGLFTALLRDYVFKVYKRNFNPEIYHLLLDQENAKIGMNDVIDQLKLNEFDKDDDIRIEKSKSLGYAFSEADPACIQLIRKQDNMI

SEQ ID NO: 22585 - protein, 1618 aa, Plasmodium falciparum 3D7
MVDDEELRKLRFLLSNKGGRIKYFFSYIFYKLFSHIYNKKNKKRERFVNIHGRTFPNFFCDNKIKSTKYTILTFIPLFLFYQFADFLNLFYLCVSLLQIIPIFNTGYVFTFVAPLLFIIFISLINEVVDDLKRFIKDLENNNEIYYSLLENGNFQKIYSKDIRVGDIILIKSKQRVPADCILLRNLNKNEESNFKVEEKRLFNCFRWNKSNNVYNKINKSYYHFNKNIDNELIDDRYNESNNNCSETSNNLLFSENEKSQKKGKKKQKKKLMLGDNNTNMNDFNFNPNDQNNNMSNQLKKKKKRKKKNNKSKKNININETTNETANYTYVKTDKIDGETDWKIKYPINIFQNLKRLKDFFTIDILFILEQPKNDIYKIEGSFVIFKYNPYGDFKTTENNNHSLNDNQLLNYSFDMAKEDEGRVQDDEDVDEDDYDDDDDEDDDDDDEDDDEDDDEEDDDEEDEEVNIPNNEKNDTQNLDDKKSVRRIFGTKNNTYSYGDDDQVQNEKKKNLDRGYLNLEEKDTDYAYNKKDKKKEMVTFIDVEKGNNERTINLNKKKNSVNTTGNRSSYVNDGKMCNVFNNEDNFNFYNVNYRKKLNYDNFILFNSVITSSDVICLVIYTGSDTRVNMSTQISKIKRGMIDEKLNLITLFLFIILTLFSIYMCSVKLNNLWYLNFIRFMLLFSSVIPISLSVNLNIAKIYYTLLIQRDKEVESTIIKNSGIIENFGDIDYIFTDKTGTLTENVMVLKVIHIGFDVIHAENEKNSIQGNNMETKQKGNYNKKMLSYNLDDMNEDVDDTSIYLASSNYSKHDRRNKNLRNGELASFSYEMENTSNINNNTKLRNYTKSNHHHNNISDNELYDEKNYNDDQRSLSNYSDTSYGDVHLKNYKQNNMILNQNMGQNRNETLTKNNNNNNNNNNNNNNNNNNMSLEKKKKKVEKMVDEFLKYKSDPLDYYNDNIDDIEYLKRHRVFQTFLSFLICNNIRTLTKESSNKEKEKTKKKKERKEKDFQKNLYYILKVNRKKKDVQKNKKENNSDNVKSSTQNKKKKHFSSNSSEDSETFSHSDVSYQCSSPDELAFLKYATNCGFILKKKTASKIEIKYKNIMLEYDILLHIPFSSETKRMSIFVRNVKNRNIYFFIKGADNVLIKKCHEKYKTFIYEESDHLSNIGLRVLVHGCLNVEEQFFHNFSALYNKNKDVKGQLENILEYVEKNIKVLAITGVEDKLQEGVGKTIEMLYNSGIKVWVLTGDKIETAICICKNANIKKKKHNIYIFRHENIKSTSNLIREFNSILHNIESYVLFFDNIIIQNCIKYIPNAFVDFAANARAVVCCRCSPIEKKEIAILIKTIKKKKILCIGDGGNDVAMIQSADIGIGVLGKEGKQVVHDSDIIVSKFKNIKKLILYYGNNTFLQTSSLCSFLIHRGFILTYLQFIYSYIFFSIPVSIFQGWLQIGYTTYYTTAPFLSLLLDIKIKKNLIYLYPEIYKNKKHKRKLDLKSFFIIVWISIFQGTVVMLGALKLFNDNYNNLINISFSSLIVLEIMNIHLEVESWHPLMISANICSFIVYIFSMFILRNYFDIMQIMSVMFWYKVILIVIFAWLPFFIIKKVKNIITPSQFFKLA

SEQ ID NO: 22586 - protein, 4226 aa, Plasmodium falciparum 3D7
MSDSKKHYNESNVRYKVKYSGKIFGNNMKKLNENNNHDFTTAEAAWMEKKKKLYKDTNNQPLWDFRKIQINPTETDELISFPSNKICSKNYGKYSFIFKGLYEQFLRLPNIWFLLISLLEFIPQYQNLSNYMYYSKHSSFFLLLFFICVSIIKNIYEDSRRSNIDYQINNRLCHMLDGPNSQLKAVRWMELSVGSIIRLIENEQVPADILLLSCNNSEGVVYIETSLLNGETNLNKKYCVNETRNETSIYAISNIRGRIVCEKPNSNMESFNGSLKLDAHPRATSLSINNVIFKGSHIKNTEYIFGVILYTGNDTKIMKNISNNKHKLGYVNKELNSYTIIGLIFTFICVFISVLFKWTEDDKFRNGSHFFLITVKDNICESIVKYTLLYSNIIPISILISVDLISILQSILIENDNHISTFENYETSEPSTIDDMDNELGDFKMDKSHTFFKKYTYFLNNRSKNFTNNRYSSTNTERASDFRKSFFGTFDKLKTIKRYFYSIKSKIKSISQSNTLYNKSSAGGSIIRSDKNKQTTFSKSFIDIFQRTNNNEHSQTLDNNNNNDNNNNNNICKEKYQNVNNSKNVYVSEDSSNNKYKQNDYLQKSQEQNEIHSINNNNYNNKNDNNLQTEFSNHNFRINAYKTNRTTKDDTYNNKHISLNSRSKSNQKGILINSNEINRKKKKNLLQKIFPFFKKKRTNISEDLSKYVFRRSKQLNINHNNSEKYNLNDYDEYGWGLCLNSNMHGDLGNVDFIFTDKTGTLTNNNMTFNMCSIAGKTYGSKCKNKKKIYNNPKSNNDNKLNSYDKNIFKNKFSSEASIKKISFVRDFSNNVSSKNDLTLDDPTELISDEGNNYLRDKYEHTSDKKNDTNKNRDGANNSNNNNNKDVSNNKNKNNNNYNYNSNNDYIKQNGECNIYNNQNNTNNTHNNNIYYDEYNNTNEGNMKNTNVNKDTNSKCNKKDFIINTSDIINNNNNNNNDQKTNNLKYKSSSSWNSKAKKSSYINLNSYNKYQSFQNSSMLSSSLSSTCSSETEDENGSQLMYYSSSNYDNLDINNDMDSTKTYSHYTEQNYYNSVKDDKDINSEHQRYQQKKTNKQTKNIQQNQCDQWEDNRYTQESIKNQYFFDRNYQTFLMKQNFPRPKSFRLNMNSSSVKGRCDFNDTKIYNDLNSQSWRGYYIDEFFKCMTLCHAVTPFIQFDYIRNKHLTYTNSRSSKGISNNMDRYNINPTTTTTNNNNNNNNINNINNINNNNNNNNNNNNNKQFSCDYMKNRNDIIFETSTDYYANQDNAKRKREKTLFDNVSHCGEIQEYRDNKKYRMKRSQTCSNNRKIFSNQRTLYDYRNMNNNLKNKNSYLRNKLKSKIFLDKSYRKRKKSSGTYKGSDICKGIEKKETRRWKRFLHMKGSNNRNIFSRIKDFKSNSIIYNNQDKTNDYKNGYSNNINNNNSNNYTNEKINRSFNKRHSAVSFKQMSKEKLIPINNVLSNRCDVESYPNEELSFSKKKKKNSEIVSFASGKSDIGFEERTDAGIAGKNMELSYNELEKYKYVKHIDSNNKYINNNNNSIHMSHMSSNNNTFESHIYFDAIKYQSSSLDEECLIYSSSFLGYRLVLRNKNTMCIEIDGSFNKWTIIGVNEFTNRRGKMSIVVKPDSMESGSILYVKGSDSSILSLLNLKYSKFLDKKYSRKRRNKNIQKYKQKREEYNELKSKDINIEEFQKSKSLSLKNFKNNTPKVLFGECTLDNNNNNINKNYKYDKNDKHNNNNNNNNNNSNYSYNYLHDSNNLDAMQNQKYSYAYEDKEDYYYTNNGECNKYKERYRRLEKQLRKFSVKGLRSMIFAFRYLSEEETIKYKRMYDDACSSIYNKEQRLEKVAEEFERDLIYLGITGVKNGLQEKVPKTIDILNQSGIRIWMLTGDNVEYSLHVSFLCKFLNKHTKIFHAALENSNAKKLKREGMALYELFQLEKEEKKPYENLCLLVNGRNLQTFLNYTDLQTHFLNMACTCDVVIACRITAKQKAFLVQLIKNRLYPTPNTLAIGDGANDIAMIQEANIGVSIMTSDCIISAGYSDYCIKKFCYLRKLLFIYGSKHLYTISIILYWNFFKNILLILPIFFYQAYASWSCVKIYPELLYTFFSIFWVFIPIIYYMFLQHNLNYDILYNIPLFYALSRRRYNMNCFKFLPWIFEAIFYSMIIYFFAYAALKENSHLNNGEVITINTFGNICFIGCLLISILRLFLEGSLWSPSILITCFGCFLFVFFPSLLFICFAYLSNEYIREVFRQTFLWAPLYVLLILWFSTCIISYIFINFTKSILFPNIYNVVNHWLFEQYQEKHNKNKYIFSLSGKNKFLKLRKLGKKIKFKFKRNYSKKYDTNVIREHPLLHHTFKSEQDQNKCNEQFSKDPFISNSLLKSKNCKFKKDSSYSKSNIHVDEEQTYKGLKVVLSEQVVHAKENLVSFKNEKKNKNNKNTSMNVNDNIIIKNNNINIKNNDNNNDDNDNDNNNNNNNNDNYNNNDHNKKEFKQKHIQNNYENLFNHTQVENNLIKENLSIRNDNNRRDNKNETDYIKQSDEDYEMNPSITSLRKRECINDSKYIDNKSYDNKISNNHEEKDGFKSDDRSLINSNMMDYKNEFTENDTTYSFNDSHMFYDFPSNSKTTKDYKVINSRIDDSIMADMKNCLNPLKNTFLVDLLPPGKRFRINEDHIYFKNNERMENIPEALDVNKKYYHIIQNKAEYYDNDSLSEFSYTSSNSSINNKKKNENTQKEIVKVSHLINRFTLAFKDMQLESGFQIHKKNKFYKTFTPWYRFIFLLLGVFFLYVWKLESSLSQLWNMPSDASTDVFILFLSLLLELVLLAATVTTFFSNIFIENFNKIISAVVILIITYHVVSYSVTHIDGVFQAVLFPLYTFVILRLPFVNAVLCNIIFLGLFIIRFNGDHFLDKKGLAHYIPLFIGVDVFVGFVGYRLEYNQRKNFLLEYSVESSRRKQREILNTMLPPFVVDEMIYSELNEEGIPISLKAEDISTVTIIFCDIYDFQNIVASIEPTRLVEVLDRLFLCFDKCTEQFNCTKIETVFETYLAACGLVKREKDEDELENNKYSNNNKNNNNNYYYNRKKKKKKNNNNNNNNNNNNNNNNNNNNNLNNNNNNNNVNTSDDDGDFFEEDDANNHQIYNQMKGQEDAHDSIDFALSILHVSSHIKYEKSKMMLKKNDSFEDANDDTHNVNDSFNNDKAENDNTNTDNNKPTRIRVKVGIHSGRIIAGVVGSKKPQYALFGDTVNTASRMKTTGKPDYIHISEATYNLVKDDKTLIYEKKETEIKGKGIMTTYLLTSVIGLNYPFLGEHVEKKGHFISELYEDDLSNNLNYDKTQNILGYYSNKINQNNDSNINEGIINNNMNTFNTIDGDTSNYYVNLKDLSLNDLPNEYIKDVNTHYCEIIKLRNLKIGTAVGYQLKQKDFYNMTFLNNGLNNDTATNFNQYIESHKDFDDIKDLRIGMNKLSISDSLYYLNENVIRNEPINEYKNKIKINSVNTNKKSYEDAHLNAGNIIYTNNEYPNGQNIEEDDDLLLTNHYNKTNVNNNNNNNIYDVSKELIEHNEEDYKNILMCSKRCKNCNETYCTPNDCNNNDHVYHVMYHRKLSNIKKNYLKNIRKDANIKKDIEKEELNKIHSNKKSFNFFYLFSYIFKIFPFIGKINKEEKKNKSYKKGEQDKSSKRIIALNSEWIFLKFSDKNLEAKYRAHFYSNKSNINSIEQALIIFLVTFVMQTLISSTVSIVFIDHKRATQTLHINYFAYWSVRSVYTFFGFVLWLLFHYRTRPEVSSLLNIKWMIFFLNLLFISAACVFSIAYLWAISETDQTTSYTIWMTNDTIEFFFYLVILHHNTGMLFQTCILVDLLFITMSLTFIATSVVKTITTDSTVLLIPWYVAFNLISTYCKESIDRRTFYANESAKKTENRATELLNDMLPKHVLEEFQQDKLKLAYTHDRLTFLFADICGFTSWANGVDASEVLTLLQKLFAKFDNDSTKYGLYKLCTIGDAYVAISEPVTEDNKDYDPVDGTERVLEMAYSMIRIIKEIREKLYIPNLNMRIGLHYGSCVGGVIGSGRLRYDLWGIDVLTGNLMESNGIPGKINVSETLKNFLLQQFKNRFIFKPHTTIRVIYKDVKCFIITDKKEVESSNHSKLLQNKNYLLNKKFSTQNYLVKNIFAKKKHSSISSSKNIHSYDEKKKKKNDLFYINVNDRQSNL

SEQ ID NO: 22587 - protein, 1864 aa, Plasmodium falciparum 3D7
MKILEWISCTIKGKHNENKIYLISNFEFNKDDHEYYIKNAENRIKEEDLNIDIIYGKKHKNEIRTAKYKLYSFLPLIVFFQFLRLGNLYFLSISMLQLIPEITDSKGMPTYLIPLVFIIVVAMIKEFFEDWQRHKSDNEENSKKTMVFVQGELKEKKWADVKDGDVVKIFSYEYFPADLIVLNCSNKKGIVNIETKNVDGESNVKQKYCLPDISKYFSDDKTAGFCRIELISERPNDNIFDYKGYMILPPLQYKNMKNGKLIHFYNTHYKMDDHKDEHDEKGTGKYINKNYKNDYNDKHISYNTNEQNNLSDMTKNDPKEYDYNPQNEINNNNNNNNCDNNNNNCNNNNRFFVDDIKKQGQNEETVDKKKSFFIINNQKKVYDTGSSNNDQITHINNDVISEKKRASRRRTLYNKLTFNKSFFNNKNENKKLNKRNSTLSSINNNNDNNNNNNNNNNNIHNREYDGEEQTLKKENFFFKEYKRDQKFVQITIDNLVLRGTSLVNTKWIYGLVINTGNRTKLMKNASTKSRQKWSRLEFVYGNHVIVLIICQVFISLIVAIAGVLWMRRKGYTLWYLNLDQTSDSLKTFFITIGSMVLLFGSFIPVDLLLIWEVVRLLQGYLINWDNDMYSEKTGRHALSKAGQLLEEMGNVTHIYSDKTGTLTQNVMQLQNIGLGNKGTYGFYDFSNIKENITKSRHWGSQDPMDPVLEEYENEENVYSNVNDDNKNDHGTNESDDNNNNNNNNDDDDHHDNNHNIHNDQNNNAQYDNYDNYYLNNHQQQNKVKNRPCIDDETNFYRNNNMNKERTRKSYTFLNPLNWSNTSINTKMKKKKSLFYNKNSLANYESLLNNTYTEDDFIRGENEFVFFNRILFVNKIYSIRHDVQDQIYFLLLVLSLCHSAMIRNVDIDEMDNNEDDNNNNEKLKIYDKETDIVYTYITQTQPQYDASSPDELALISTSLYLGCEFVNRPNLTTIEIELTSTFAQRFILGEKKFEKFLEKKEFYEKEFDTYFPDISACLGKEKKKDNNKINEMINNKGNTKDDYMNNFHMSIPIKNIFGSNKMQYKEEIKYEEKIIKKVVPILSFEILDVFAFDNVRKRMSLIVKNEKKEIFMLVKGADTSVLKLASKNQENIVDHVEHQLHAFATSGLRTLVLGYKYLTENEFSDMYRNHINARKKSETDKEEYLQEFYEEAENNLIIIGCTGIDDKLQDDVPQVIQDLRDAGMTICVLTGDKLETAINIGHSINILNKQTYNAIFTETDPTLLLEQLNIHEKNTNAANLLNVDHGTKWWNSVNWEHLNLDLRSETILNFMKSNFHGSLKKSIISSNMFNMKNNNSFPSLARQDKVFNSFLESSESFCHNNNEMDKTKGKEKVHYSQFSITITGEALDVIMKDKILKIKFYTLARSASTLIACRVTPKQKSLLVKENSAFNPRGTSLAIGDGANDVGMILMANVGVGIAGKEGLQAARSSDFTISEFKYLKKLLFVHGRESLRRNSFLVYFCIFRNVSFCLCSMILIFWTGYSAIDAWNPWTKQIINIAFTSLPVIFFVALDKQLPHNILLNNPLLYETSPSTLWPFYSNRKMEFYTNKVKGCYKSFYKFCFFPIRYIPYIQRYTEKIKSWIGKRSKPEKYRTYGTHYLFVYLLFAIWLATVETVIMLHFSTGQAYSSSLKDNHHVDIDFNTFSQILYTHHVIAVNIVVVLMTNTWFFISHVVLWIELIATFFFWFIISNTKFFLDIIGADELHGTFEKAHSSGNYYASLIISLYISILPLIILMTYQFIKKPTMEQIVLEQLKLGKFEGLRKHEIKKLAYIDNQKSSNEFTHKGFAFAVEAKEAFWGLVQKAIYKIKMPLVKDETANIKHKRKS

SEQ ID NO: 22588 - protein, 3127 aa, Plasmodium falciparum 3D7
MKTQTLSLMNINGKRKFLGTNNKIYRKVIINPTSEDDIQKFCRNYFRIYNFSLYNFIRRLISFDAILVYSLFLTVYIFSEINHGETKKYLFIDTAISLFFNIILLIVIESLFELKKLKDVKNANSQYYLRIVPKMSYFEKVMTKDIKVGNIIRIFQGDEFPADVVILYVKNNANAIVDSFKIDGLFRKSIKYAVDKYKIDKDYLKMLSEINGVIRCELPNKNIFCFQGNFKLDKHPRSLLLNYENFALQSSVLKGAEYIDAVVVYTGADTKKNLNIPQKIEENKTFCIKMNNIVYYLIFMYFVFVVLSIVIKTIFFHKKNSFQNSRDSFLSMLEDFVGLYILVLPIMMYSEKSLIYIIQSLRIENDLRMRNTDSEKPKVFNKNKNDSLGNVDLLATSRNGVLVKRKELLVSCVINNVMYGKKDIICSRTNFKLPTLNILDSERKNVSNLLNLDERIFKDPENIFFPTRDFYSFLKLFENKISSIYNPYSSSLSNLLKEKYKNYVNEEILNKNVKLTSFVKSQLTIGYNQICEDDELSYNCYEIKEDSQKENIQSVKIEDFILGLCGCNRIIIYNEKSLDISMNEYKSDNFMETYSKFETENEEYHENDHDEYHNMEHSDDENINSIEYEDICLYNIIRNTGFSIYCYKNTLFLYNLMKECKVYFLTCYHDFLRSNKFSMCILKCGYSINNEKEGGILYVRGYDFNILPYISKEKNNIKKIKNVIKIYTLNYLKVIILCKKQISNEDIAKYIILKSISKKLSFKFYDLIKLFFLYDLEVIGIIGLKNQLREGVKETFNDVINFDIKSWIFANECSKDTYLTALQCNLIVSSSNLFLINYYNLKNTHEEGANILFHNFISSLYKLKSNSYAVVINDESIKNIMTNVESMKIFLCIAMRATVVLFCKLQNETKGKIIRTLYALTSPKLTVLGIGTTLNDAYLLKYSSISVFLSLNEHVNILYNISDYVLQEFKFISELLILGRLNRFSLCKVFLWIIYLKITVVSFYFFHNFDNYFSGSSASSILYTQTTFALLHYFLIIAFSAYEIDLPYKFVRRLPYIYQLSRRKYFLNNNIILLTIIEAILISLTSYYILRLNVFHLITHREFTFHIFILNVFITTEKILLLSKTWHIYFFIMAVLIIGILLIYVNIFTLVDCIKNGKCEFSLFQMENIYFWTSLFPILYINFIFDKLMKYIKNRIYPDISDYLRKYFLRRICCHNNDKFLSQRKIKGINKFVNFEKNDILLKYIPTPKIYKIKDDPTYYNKSKRSKFLYDTFRKVIDINVKYRNQQLNLEYKTYEKGNKLKLRIIVILLFLIYIIIFSSQTIIDINTKSNIHYITMFYIIYFVLACVLLIYIRIRNKATSTFFFFLSRFLLICGFCIELYDNISNDILNVLITYSFTVSYIFFMSFKILEALLVCISILLLTFGVYYEKNKNMIDICTHFCSNPYLSINNLDHMNISCLCKKQIVIFLISLLSFTLICLSMKYYEIFYLKKKFLFRYKQKVNLAKQIEILHTMLPNFLVEYLLISDPKNDGIMVGKNISGEDRGIISVIFCDIDDFQNMVSTLQPHVLVETLDNLYLYFDKCIKYFNCIKIETVFESYLAASGLSEKKNNALDKIMYDTKCAIKLAIAQLSAKYYISYKVLDTREHFSDNSTSYDKYINKNISLKIGIHTGKAISGVIGSVKPQYALFGDTVNTASRMKSTSLPDHIHVSYDTYKYLKEDNTFIWKERKVFIKGKGKMKTYLLVDILDDVKRKGESLNYYSSSNLLLSQLGSEAVSIYEEREDIKEGSMDIIKESSRDIIKEDSRDIIKEISTNISKSSSRNISKSSSRSISDIKEGQIIDKEDLIFKINRMKNKIDSRYSKRIDKESRDKISDKTNHVLDEVVKHSDIHLLNYEINNKRCKKMKGDTNNENKLIGDIFNMYDKKIKYIYKKNYKSKSMENISFIKHYRNTKYKKSDYLLLDNKGESKKFKRNTSYVLESPLHLIGDIVDNNIKRKKKKKEIKTIVSDDMFTSPVNIKEYNYNEQERKKEIVGNLSYDKTKKIFPFIKFTKEGRIKKKKIEKKEKKEKKENNNNFLYNDDYSSYSSPKYGDNENNFVIKYIRERKDFQKKFDHPNFNFSKFLHNYNPMKNKNKNKKNNKNVRRNEYPNYTSSSKDGVSYNFLSDSLFSSDNEYSSDNEYSSDSEKYYKKRFKKNKKIIKFDDLFTKIYIKKKRLLQMNNYDVKGKGKKLKNKGMERNKTKYKNVNEITKMKYFVNNENRDHEVNKEDISKSMQKYFLHISKHKKEQIEDKKKTHKYFHKNVECVYPYAGNNINHNFSRNEKRKYSINLYDHLDEQEKIKGKKKYFNKDKELIGSINKQTERKPKKKNKKNIENKKDKKKIRMITNKTKEKHSNSIISVEEQNMNHNNSLKKKEVNFTGKNEEYLNRANTNCSLGIKEMEEDVYEFHSNNIYYNNQTSYSDDINNTTKLKGMGNNTNDISKNKGKNKLGKKISFFSMNNKYHESEIMNEEDNKNMLNLTQSQIINKDKYNYFTHCPSLKKKKSVFTKINNLFKNYFKSIDVHEKFGFSKKFKFHSKDSDDIKGNNNKISKNRYNNNNNNNNSNYSNIDSGKYSHNNKKNHHHNNNKYHHHNNNKYHHHNNNKYHHQNNNYEKHHHSNNSRVMLSKGEKTEKNENVDYAYQFDNYDKKLLKKLTSNLQLNKKNVKNFNMFYYKFNDEELEEEYTRNYYREIINIDLTKKLIIIFIFTEIFLSLCNIIELSFYEKKLRYNDSIVIIWLIRSIYLFIITYIWIILKTKLKEYKNNSSKMMWTIFILNIFLCSWGIILIDLSCIHYSMLLGNKNERALFFMKDASELIICIQLIFIKNMLFKHKFFFFVFFYIFLIYSFSKLFSIHTCQTHICCSIILFISINILYFWYSEYLDRIQFLVKRKRNRMEKISQDFLTKILPRQVLEEYQNDNLQLTYKHEKIAFLFADIVGFTKWSKTVSPKEVLKLLQKLISKIDKDTIKLGLYKLFTIGDAYVATSQPNSSITDESEALEGILNILKLAKLILHNINTIKIQFNKHDFNMRIGLHYGSCVGGIIGSVRIRYDMWGLDVLIANKIESNGIPGEIICSEQFRHFFIQNEPQA

SEQ ID NO: 22589 - protein, 1213 aa, Arabidopsis thaliana
MVRSGSFSVDSSATHQRTPSRTVTLGHIQPQAPTYRTVYCNDRESNQPVRFKGNSISTTKYNVFTFLPKGLFEQFRRIANIYFLGISCLSMTPISPVSPITNVAPLSMVLLVSLIKEAFEDWKRFQNDMSINNSTVEILQDQQWVSIPWRKLQVGDIVKIKKDGFFPADILFMSSTNSDGICYVETANLDGETNLKIRKALERTWDYLVPEKAYEFKGEIQCEQPNNSLYTFTGNLVVQKQTLPLSPDQLLLRGCSLRNTEYIVGAVVFTGHETKVMMNAMNAPSKRSTLEKKLDKLIITIFCVLVTMCLIGAIGCSIVTDREDKYLGLHNSDWEYRNGLMIGFFTFFTLVTLFSSIIPISLYVSIEMIKFIQSTQFINRDLNMYHAETNTPASARTSNLNEELGQVEYIFSDKTGTLTRNLMEFFKCSIGGVSYGCGVTEIEKGIAQRHGLKVQEEQRSTGAIREKGFNFDDPRLMRGAWRNEPNPDLCKELFRCLAICHTVLPEGDESPEKIVYQAASPDEAALVTAAKNFGFFFYRRTPTMVYVRESHVEKMGKIQDVAYEILNVLEFNSTRKRQSVVCRFPDGRLVLYCKGADNVIFERLANGMDDVRKVTREHLEHFGSSGLRTLCLAYKDLNPETYDSWNEKFIQAKSALRDREKKLDEVAELIEKDLILIGSTAIEDKLQEGVPTCIETLSRAGIKIWVLTGDKMETAINIAYACNLINNEMKQFVISSETDAIREAEERGDQVEIARVIKEEVKRELKKSLEEAQHSLHTVAGPKLSLVIDGKCLMYALDPSLRVMLLSLSLNCTSVVCCRVSPLQKAQVTSLVRKGAQKITLSIGDGANDVSMIQAAHVGIGISGMEGMQAVMASDFAIAQFRFLTDLLLVHGRWSYLRICKVVMYFFYKNLTFTLTQFWFTFRTGFSGQRFYDDWFQSLFNVVFTALPVIVLGLFEKDVSASLSKRYPELYREGIRNSFFKWRVVAVWATSAVYQSLVCYLFVTTSSFGAVNSSGKVFGLWDVSTMVFTCLVIAVNVRILLMSNSITRWHYITVGGSILAWLVFAFVYCGIMTPHDRNENVYFVIYVLMSTFYFYFTLLLVPIVSLLGDFIFQGVERWFFPYDYQIVQEIHRHESDASKADQLEVENELTPQEARSYAISQLPRELSKHTGFAFDSPGYESFFASQLGIYAPQKAWDVARRASMRSRPKVPKK

SEQ ID NO: 22590 - protein, 1123 aa, Arabidopsis thaliana
MVRSGSFSVDSSATHQRTPSRTVTLGHIQPQAPTYRTVYCNDRESNQPVRFKGNSISTTKYNVFTFLPKGLFEQFRRIANIYFLGISCLSMTPISPVSPITNVAPLSMVLLVSLIKEAFEDWKRFQNDMSINNSTVEILQDQQWVSIPWRKLQVGDIVKIKKDGFFPADILFMSSTNSDGICYVETANLDGETNLKIRKALERTWDYLVPEKAYEFKGEIQCEQPNNSLYTFTGNLVVQKQTLPLSPDQLLLRGCSLRNTEYIVGAVVFTGHETKVMMNAMNAPSKRSTLEKKLDKLIITIFCVLVTMCLIGAIGCSIVTDREDKYLGLHNSDWEYRNGLMIGFFTFFTLVTLFSSIIPISLYVSIEMIKFIQSTQFINRDLNMYHAETNTPASARTSNLNEELGQVEYIFSDKTGTLTRNLMEFFKCSIGGVSYGCGVTEIEKGIAQRHGLKVQEEQRSTGAIREKGFNFDDPRLMRGAWRNEPNPDLCKELFRCLAICHTVLPEGDESPEKIVYQAASPDEAALVTAAKNFGFFFYRRTPTMVYVRESHVEKMGKIQDVAYEILNVLEFNSTRKRQSVVCRFPDGRLVLYCKGADNVIFERLANGMDDVRKVTREHLEHFGSSGLRTLCLAYKDLNPETYDSWNEKFIQAKSALRDREKKLDEVAELIEKDLILIGSTAIEDKLQEGVPTCIETLSRAGIKIWVLTGDKMETAINIAYACNLINNEMKQFVISSETDAIREAEERGDQVEIARVIKEEVKRELKKSLEEAQHSLHTVAGPKLSLVIDGKCLMYALDPSLRVMLLSLSLNCTSVVCCRVSPLQKAQVTSLVRKGAQKITLSIGDGANDVSMIQAAHVGIGISGMEGMQAVMASDFAIAQFRFLTDLLLVHGRWSYLRICKVVMYFFYKNLTFTLTQFWFTFRTGFSGQRFYDDWFQSLFNVVFTALPVIVLGLFEKDVSASLSKRYPELYREGIRNSFFKWRVVAVWATSAVYQSLVCYLFVTTSSFGAVNSSGKVFGLWDVSTMVFTCLVIAVNVRILLMSNSITRWHYITVGGSILAWLVFAFVYCGIMTPHDRNENVYFVIYVLMSTFYFYFTLLLVPIVSLLGDFIFQGYGGEMVLPV

SEQ ID NO: 22591 - protein, 1174 aa, Arabidopsis thaliana
MAGERRKGMKFSKLYSFKCFKPFSREDHSQIGSRGYSRVVFCNDPDNPEALQLNYRGNYVSTTKYTAANFIPKSLFEQFRRVANIYFLVVAFVSFSPLAPYTAPSVLAPLLIVIGATMVKEGVEDLRRRKQDVEANNRKVEVLGKTGTFVETKWKNLRVGDLVKVHKDEYFPADLLLLSSSYEDGICYVETMNLDGETNLKLKHALEITSDEESIKNFRGMIKCEDPNEHLYSFVGTLYFEGKQYPLSPQQILLRDSKLKNTDYVYGVVVFTGHDTKVMQNATDPPSKRSKIEKKMDQIIYILFSILIVIAFTGSVFFGIATRRDMSDNGKLRRWYLRPDHTTVFYDPRRAVAAAFFHFLTALMLYGYLIPISLYVSIEVVKVLQSIFINQDQEMYHEETDRPARARTSNLNEELGQVDTILSDKTGTLTCNSMEFVKCSIAGTAYGRGMTEVEVALRKQKGLMTQEEVGDNESLSIKEQKAVKGFNFWDERIVDGQWINQPNAELIQKFFRVLAICHTAIPDVNSDTGEITYEAESPDEAAFVIASRELGFEFFSRSQTSISLHEIDHMTVYELLHVLEFSSSRKRMSVIVRNPENRLLLLSKGADSVMFKRLAKHGRQNERETKEHIKKYAEAGLRTLVITYREIDEDEYIVWEEEFLNAKTLVTEDRDALIDAAADKIEKDLILLGSTAVEDKLQKGVPDCIEKLSQAGVKIWVLTGDKTETAINIGYACSLLREGMKQILVTLDSSDIEALEKQGDKEAVAKLREGMSQTAAVTDNSAKENSEMFGLVIDGKSLTYALDSKLEKEFLELAIRCNSVICCRSSPKQKALVTRLVKNGTGRTTLAIGDGANDVGMLQEADIGVGISGAEGMQAVMASDFAIAQFRFLERLLLVHGHWCYRRITLMICYFFYKNLAFGFTLFWYEAYASFSGKPAYNDWYMSCYNVFFTSLPVIALGVFDQDVSARLCLKYPLLYQEGVQNVLFSWERILGWMLNGVISSMIIFFLTINTMATQAFRKDGQVVDYSVLGVTMYSSVVWTVNCQMAISINYFTWIQHCFIWGSIGVWYLFLVIYGSLPPTFSTTAFQVFVETSAPSPIYWLVLFLVVFSALLPYFTYRAFQIKFRPMYHDIIVEQRRTERTETAPNAVLGELPVQVEFTLHHLRANLSRRDSWN

SEQ ID NO: 22592 - protein, 1189 aa, Arabidopsis thaliana
MAGERRKGMKFSKLYSFKCFKPFSREDHSQIGSRGYSRVVFCNDPDNPEALQLNYRGNYVSTTKYTAANFIPKSLFEQFRRVANIYFLVVAFVSFSPLAPYTAPSVLAPLLIVIGATMVKEGVEDLRRRKQDVEANNRKVEVLGKTGTFVETKWKNLRVGDLVKVHKDEYFPADLLLLSSSYEDGICYVETMNLDGETNLKLKHALEITSDEESIKNFRGMIKCEDPNEHLYSFVGTLYFEGKQYPLSPQQILLRDSKLKNTDYVYGVVVFTGHDTKVMQNATDPPSKRSKIEKKMDQIIYILFSILIVIAFTGSVFFGIATRRDMSDNGKLRRWYLRPDHTTVFYDPRRAVAAAFFHFLTALMLYGYLIPISLYVSIEVVKVLQSIFINQDQEMYHEETDRPARARTSNLNEELGQVDTILSDKTGTLTCNSMEFVKCSIAGTAYGRGMTEVEVALRKQKGLMTQEEVGDNESLSIKEQKAVKGFNFWDERIVDGQWINQPNAELIQKFFRVLAICHTAIPDVNSDTGEITYEAESPDEAAFVIASRELGFEFFSRSQTSISLHEIDHMTGEKVDRVYELLHVLEFSSSRKRMSVIVRNPENRLLLLSKGADSVMFKRLAKHGRQNERETKEHIKKYAEAGLRTLVITYREIDEDEYIVWEEEFLNAKTLVTEDRDALIDAAADKIEKDLILLGSTAVEDKLQKGVPDCIEKLSQAGVKIWVLTGDKTETAINIGYACSLLREGMKQILVTLDSSDIEALEKQGDKEAVAKASFQSIKKQLREGMSQTAAVTDNSAKENSEMFGLVIDGKSLTYALDSKLEKEFLELAIRCNSVICCRSSPKQKALVTRLVKNGTGRTTLAIGDGANDVGMLQEADIGVGISGAEGMQAVMASDFAIAQFRFLERLLLVHGHWCYRRITLMICYFFYKNLAFGFTLFWYEAYASFSGKPAYNDWYMSCYNVFFTSLPVIALGVFDQDVSARLCLKYPLLYQEGVQNVLFSWERILGWMLNGVISSMIIFFLTINTMATQAFRKDGQVVDYSVLGVTMYSSVVWTVNCQMAISINYFTWIQHCFIWGSIGVWYLFLVIYGSLPPTFSTTAFQVFVETSAPSPIYWLVLFLVVFSALLPYFTYRAFQIKFRPMYHDIIVEQRRTERTETAPNAVLGELPVQVEFTLHHLRANLSRRDSWN

SEQ ID NO: 22593 - protein, 1200 aa, Arabidopsis thaliana
MVGGGTKRRRRRLQLSKLYTLTCAQACFKQDHSQIGGPGFSRVVYCNEPDSPEADSRNYSDNYVRTTKYTLATFLPKSLFEQFRRVANFYFLVTGVLAFTPLAPYTASSAIVPLLFVIGATMVKEGVEDWRRQKQDNEVNNRKVKVHRGDGSFDAKEWKTLSIGDIVKVEKNEFFPADLVLLSSSYEDAICYVETMNLDGETNLKVKQGLEVTSSLRDEFNFKGFEAFVKCEDPNANLYSFVGTMELKGAKYPLSPQQLLLRDSKLRNTDFIFGAVIFTGHDTKVIQNSTDPPSKRSMIEKKMDKIIYLMFFMVITMAFIGSVIFGVTTRDDLKDGVMKRWYLRPDSSSIFFDPKRAPVAAIYHFLTAVMLYSYFIPISLYVSIEIVKVLQSIFINQDIHMYYEEADKPARARTSNLNEELGQVDTILSDKTGTLTCNSMEFIKCSVAGTAYGRGVTEVEMAMGRRKGGPLVFQSDENDIDMEYSKEAITEESTVKGFNFRDERIMNGNWVTETHADVIQKFFRLLAVCHTVIPEVDEDTEKISYEAESPDEAAFVIAARELGFEFFNRTQTTISVRELDLVSGKRVERLYKVLNVLEFNSTRKRMSVIVQEEDGKLLLLCKGADNVMFERLSKNGREFEEETRDHVNEYADAGLRTLILAYRELDEKEYKVFNERISEAKSSVSADRESLIEEVTEKIEKDLILLGATAVEDKLQNGVPDCIDKLAQAGIKIWVLTGDKMETAINIGFACSLLRQDMKQIIINLETPEIQSLEKTGEKDVIAKASKENVLSQIINGKTQLKYSGGNAFALIIDGKSLAYALDDDIKHIFLELAVSCASVICCRSSPKQKALVTRLVKSGNGKTTLAIGDGANDVGMLQEADIGVGISGVEGMQAVMSSDIAIAQFRYLERLLLVHGHWCYRRISTMICYFFYKNITFGFTLFLYETYTTFSSTPAYNDWFLSLYNVFFSSLPVIALGVFDQDVSARYCLKFPLLYQEGVQNVLFSWRRILGWMFNGFYSAVIIFFLCKSSLQSQAFNHDGKTPGREILGGTMYTCIVWVVNLQMALAISYFTLIQHIVIWSSIVVWYFFITVYGELPSRISTGAYKVFVEALAPSLSYWLITLFVVVATLMPYFIYSALQMSFFPMYHGMIQWLRYEGQCNDPEYCDIVRQRSIRPTTVGFTARLEAKKRSVRISEPAS

SEQ ID NO: 22594 - protein, 1202 aa, Arabidopsis thaliana
MAGPSRRRRRLHLSKIYSYTCGKSSFQEDHSNIGGPGFSRVVYCNEPGSPAAERRNYAGNYVRSTKYTVASFFPKSLFEQFRRVANFYFLVTGILSLTDLSPYGAVSALLPLALVISATMVKEGIEDWRRKQQDIEVNNRKVKVHDGNGIFRQEEWRNLRVGDIVRVEKDEFFPADLLLLSSSYEDSVCYVETMNLDGETNLKVKQGLEATSSLLNQDSDFKDFRGVVRCEDPNVNLYVFVGTLALEEERFPLSIQQILLRDSKLRNTEYVYGAVVFTGHDTKVIQNSTDPPSKRSRIERTMDKIIYLMFGLVFLMSFVGSIIFGVETREDKVKNGRTERWYLKPDDADIFFDPERAPMAAIYHFFTATMLYSYFIPISLYVSIEIVKVLQSIFINRDIHMYYEETDKPAQARTSNLNEELGMVDTILSDKTGTLTCNSMEFIKCSIAGKAYGRGITEVERAMAVRSGGSPLVNEDLDVVVDQSGPKVKGFNFEDERVMNGNWVRQPEAAVLQKFFRLLAVCHTAIPETDEESGNVSYEAESPDEAAFVVAAREFGFEFFNRTQNGISFRELDLVSGEKVERVYRLLNVLEFNSTRKRMSVIVRDDDGKLLLLSKGADNVMFERLAKNGRQFEAKTQEHVNQYADAGLRTLVLAYREVDENEYIEFNKSFNEAKASVSEDREALIDEITDKMERDLILLGATAVEDKLQNGVPECIDKLAQAGIKIWVLTGDKMETAINIGFASSLLRQEMKQIIINLETPQIKSLEKSGGKDEIELASRESVVMQLQEGKALLAASGASSEAFALIIDGKSLTYALEDEIKKMFLDLATSCASVICCRSSPKQKALVTRLVKSGTGKTTLAIGDGANDVGMLQEADIGVGISGVEGMQAVMSSDIAIAQFRYLERLLLVHGHWCYSRIASMICYFFYKNITFGVTVFLYEAYTSFSGQPAYNDWFLSLFNVFFSSLPVIALGVFDQDVSARFCYKFPLLYQEGVQNILFSWKRIIGWMFNGFISALAIFFLCKESLKHQLFDPDGKTAGREILGGTMYTCVVWVVNLQMALSISYFTWVQHIVIWGSIAFWYIFLMIYGAMTPSFSTDAYMVFLEALAPAPSYWLTTLFVMIFALIPYFVYKSVQMRFFPKYHQMIQWIRYEGHSNDPEFVEMVRQRSIRPTTVGYTARRAASVRRSARFHDQIYKDLVGV

SEQ ID NO: 22595 - protein, 1203 aa, Arabidopsis thaliana
MTKCRRRRLHLSNIYAFKGRKSNFQEDHSHIGGPGFSRVVYCNEPNSPAAERRNYVGNYVRSTKYTLASFIPKSLFEQFRRVANFYFLVTGVLSLTALSPYSPISALLPLTFVIAASMVKEAIEDWGRKKQDIEMNNRKVKVHDGNGIFRREGWRDLKVGNIVRVEKDEFFPADLLLLSSSYEDSICYVETMNLDGETNLKVKQGLEATSSALHEDSDFKELKAVVKCEDPNADLYTFVGTLHFEEQRLPLSITQLLLRDSKLRNTEYIYGVVVFTGHDTKVIQNSTDPPSKRSRIERKMDKIIYLMFGVVFLMSFIGSIVFGIETREDRVRNGGRTERWYLRPDNADIFFDPDRAPMAAVYHFFTAVMLYSYFIPISLYVSIEIVKVLQSLFINNDILMYYEENDKPAHARTSNLNEELGMVDTILSDKTGTLTCNSMEFIKCSIAGTAYGRGITEVERSMAMRSNGSSLVGDDLDVVVDQSGPKIKGFNFLDERVMKGNWVKQRDAAVLQKFFRLLAVCHTAIPETDEATGSVSYEAESPDEAAFVVAAREFGFEFFSRTQNGISFRELDLASGKTVERVYRLLNVLEFNSARKRMSVIVRDEDGRLLLLSKGADNVMFERLAKNGRKFEEKTREHVNEYADAGLRTLILAYREVDENEYIEFSKNFNEAKNSVTADRESLIDEITEQMERDLILLGATAVEDKLQNGVPDCIDKLAQAGIKIWVLTGDKMETAINIGFACSLLRQEMKQIIINLETPHIKALEKAGEKDAIEHASRESVVNQMEEGKALLTASSSASSHEAFALIIDGKSLTYALEDDFKKKFLDLATGCASVICCRSSPKQKALVTRLVKSGTGKTTLAIGDGANDVGMLQEADIGVGISGVEGMQAVMSSDIAIAQFRYLERLLLVHGHWCYSRISSMICYFFYKNITFGVTVFLYEAYTSFSAQPAYNDWFLSLFNVFFSSLPVIALGVFDQDVSARYCYKFPLLYQEGVQNLLFSWKRIIGWMFNGVFTALAIFFLCKESLKHQLYNPNGKTAGREILGGTMYTCVVWVVNLQMALAISYFTWLQHIVIWGSVAFWYIFLMIYGAITPSFSTDAYKVFIEALAPAPSYWLTTLFVMFFALIPFFVFKSVQMRFFPGYHQMIQWIRYEGHSNDPEFVEMVRQRSIRPTTVGFTARRAASVRRSGRFHDQLNKNFIAF

SEQ ID NO: 22596 - protein, 789 aa, Glycine max
  unsure (1)..(789): unsure at all Xaa locations
PRVRSYFMIEDRDMYDASSGSRFQCRSLNINEDLGQIRYVFSDKTGTLTENKMEFQRASVHGKNYGSSLPMVDNTAAEDVIPKRKWKLKSEIAVDSELMTLLQKDSNREEKIAANEFFLTLAACNTVIPILSDDGFSNTRRIDYQGESPDEQALVSAASAYGYTLFERTSGHIVIDVNGEKLRLDVLGLHEFDSVRKRMSVVIRFPDNAVKVLVKGADTSMFSILENGSESNIWHATESHLNEYSSQGLRTLVVGSRDLSDAELEEWQSKYEDASTSLTDRAAKLRQTAALIECNLKLLGATGIEDKLQEGVPEAIESLRQAGIKVWVLTGDKQETAISIGLSCKLLSADMQQIIINGTSEVECRNLLADAKTKYGVKSSSREQQNLKEEETTAPLALIIDGNSLVYILEKELQSELFDLATSCRVVLCCRVAPLQKAGIVDLIKSRTDDMTLAIGDGANDVSMIQMADVGVGICGQEGRQAVMASDFAMGQFQFLKKLLLVHGHWNYQRVGYLVLYNFYRNAVFVMMLFWYILCTAFSTTSALTDWSSVFYSVIYTSIPTIIVGIQDKDLSHRTLLQYPKLYGSGHRQEAYNMQLFWITMMDTVWQSLVLFYIPLFTYKDSSIDIWSMGSLWTIAVVILVNVHLAMDINRWVLITHVAIWGSIIITYGSMVVLDSIPVFPNYWTIYHLARSPTYWITILLIIIVALLPRFTCKVVYQIFWPSDIQIAREAKLXEKMARXFAAKATSFQLTCVTVPRLIETTEISNEMASLVFVRHNAFLWQLVVQVTK

SEQ ID NO: 22597 - protein, 665 aa, Glycine max
  unsure (1)..(665): unsure at all Xaa locations
XQSIFVLRERFFALGQVVQREYKILNLLDFTSKRKRMSVIVRDEEGNIILFCKGADSIIFDRLSKNGKMCLEATTRHLNEYGEAGLRTLALAYRKLDDQEYSDWNNEFQKAKTAVGSEREAMLEQVSDIMERELILVGATAVEDKLQKGVPQCIDKLAQAGLKIWVLTGDKMETAINIGFACSLLRQGMKQICITMNSDSVTNDGKEVIKGNILNQITNASQMIKLEKDPHAAFALIIDGKTLTYALEDDVKHQFLGLAVGCASVICCRVSPKQKALVTRLVKEGTGKTTLAIGDGANDVGMIQEADIGVGISGVEGMQAVMASDFAIAQFRFLERLLVVHGHWCYKRIAQMICYFFYKNIAFGLTIFYFEAFAGFSGQSVYDDWYMILFNVFLTSLPVISLGVFEQDVPSEVCLQFPALYQQGPKNLFFDWYRILGWMGNGLYSSLVIFFLVITIFYDQAFRANGQVADMAAVGTTMFTCIIWAVNCQIALTMSHFTWIQHLFVWGSITTWYVFLLLYGMLPPQYSKSAYQLLVEVLAPAPIYWAATLLVTIACVLPYLAHISFQRCFNPMDHHIIQEIKYYKKDIEDQHMWTRERSKARHETKIGFTARVEAKIRQFKGKLQKKQQSSLGAFSPSXPLQNNLLVFSPFRVCIFLFIFWGSSLI

SEQ ID NO: 22598 - protein, 470 aa, Glycine max
  unsure (1)..(470): unsure at all Xaa locations
XTELYASETRKLVESFINYVIYKLSRSGLQNVEGKRIHDFFLTLATCNTIVPLVVECXDTPDPDVKLIDYQGESPDEQALAYSAAAYGFMLIERTSGHIVIDIHGQRQKFNVLGMHEFDSDRKRMSVILGYPDNSVKVFVKGADTSMLNVIDRSFKMVVRATEAHLHSYSSMGLRTLVIGMRDLNASEFEQWHASFEAASTAVFGRAAMLHKVSSIVGNNLCILGATAIEDKLQQGVPESIESLRTAGIKVWVLTGDKQQTAISIGYSSKLLTSNMNLITINTNNRESCRKSLQDANAGGSSHAVSTPLALIIDGTSLVHILDSELEEQLFQLASRCSVVLCCRVAPLQKAGIVALVKNRTADMTLAIGDGANDXVSMIQMAHVGVGISGQEGRQAVMASDFAMGQFRLLVPLLLIHGHWNYQRLGYMILYNFYRNAVLVLVLFWYVAFDCMXSLMLQELDCSGYCCLES

SEQ ID NO: 22599 - protein, 550 aa, Glycine max
  unsure (1)..(550): unsure at all Xaa locations
XFGSSKTTVTEDRDVLVDAAADKMERDLILLGATAVEDRLQKGVPECIEKLARAKIKLWVLTGDKMETAVNIGYACSLLRQDMKQIVITLDSPDILSLEKQGDKEALSKASLESIKKQIREGISQTAKESSNTNKGSSSGFGLIIDGKSLDYSLNKNLERSFFELAINCASVICCRSSPKQKARVTKLVKLGTGKTTLSIGDGANDVGMLQEADIGVGISGAEGMQAVMASDFAIAQFRFLERLLLVHGHWCYRRISMMICYFFYKNIAFGFTLFWFEAYASFSGQAAYNDWYMSFYNVFFTSLPVIALGVFDQDVSAKLCLKYPYLYLEGVEDILFSWPRILGWMLNGVLSSLVIFFLTTNSVLNQAFRRDGKVVDFEILGVTMYTCVVWTVNCQMALSINYFTWIQHFFIWGSIAFWYVFVLVYGYLSPAISTTAYRVFVEACAPSGLYWLVTLLVVVCVLLPYFSYRSFQSRFLPMYHDIIQRKQVEGHEVGLSDXXELPKQVQGKLLHLRERLKQRELXNVNASKHPFLELEIVFSFLLSWEVALK

SEQ ID NO: 22600 - protein, 468 aa, Glycine max
  unsure (1)..(468): unsure at all Xaa locations
XLRFLGRVXRKGALNAGNNLCILGATAIEDKLQQGVPESIESLRTAGIKVWVLTGDKQQTAISIGYSSKLLTSNMNLITINTNNRESCRRRLQDANSEGRSDAVSTPLALIIDGTSLVYILDSELEEELFQLANRCSVVLCCRVAPLQKAGIVALVKNRTDDMTLAIGDGANDVSMIQMAHVGVGISGQEGRQAVMASDFAIGQFRLLVPLLLIHGHWNYQRLGYMIIYNFYRNAIFVLVLFWYVLFTAFTLTTAINEWSSTLYSIIYSSLPTIIVGILDKDLGKRTLLKYPQLYGAGQRHEAYNKKLFLLTMLDTLWQSMVIFWAPLFAYWSSTIDVASIGDLWTLGVVILVNLHLAMDVIRWYWVTHVVIWGSIVATFISVMIIDSIPNLPGYWAFFDAAGTGLFWLLLLGIIVTALLPHLVVKFVYQYYFPNDIQICREAEKIGYDRVVESGQVEMLPISDNPSR

SEQ ID NO: 22601 - protein, 536 aa, Glycine max
  unsure (1)..(536): unsure at all Xaa locations
XFGSSKTTVTEDRDVLVDAAADKMERDLILLGATAVEDRLQKGVPECIEKLARAKIKLWVLTGDKMETAVNIGYACSLLRQDMKQIVITLDSPDILSLEKQGDKEALSKASLESIKKQIREGISQTAKESSNTNKGSSSGFGLIIDGKSLDYSLNKNLERSFFELAINCASVICCRSSPKQKARVTKLVKLGTGKTTLSIGDGANDVGMLQEADIGVGISGAEGMQAVMASDFAIAQFRFLERLLLVHGHWCYRRISMMICYFFYKNIAFGFTLFWFEAYASFSGQAAYNDWYMSFYNVFFTSLPVIALGVFDQDVSAKLCYYIXXERLKQRGCENVNASKHPFLXKLEIVFSFLLSWEVALXVVVRIANSXDGKVVDFEILGVTMYTCVVWTVNCQMALSINYFTWIQHFFIWGSIAFWYVFVLVYGYLSPAISTTAYRVFVEACAPSGLYWLVTLLVVVCVLLPYFSYRSFQSRFLPMYHDIIQRKQVEGHEVGLSDXXELPKQVQGKLLHLRERLKQRELXNVNASKHPFLET

SEQ ID NO: 22602 - protein, 512 aa, Glycine max
  unsure (1)..(512): unsure at all Xaa locations
VPQCIDNLAQAGLKIWVLTGDKMETAINIGFACSLLRQGMKQICITTPVTDSVATDVKQAIKDNILNQITNGSQMIKLEKDPHAAFALIIDGKTLTYALEDDMKLLFLGLAVDCASVICCRVSPKQKALVTRLVKQGSGKTTLAIGDGANDVGMIQEADIGVGISGVEGMQAVMASDFAIAQFRFLERLLVVHGHWCYKRIAQMICYFFYKNITFGLTIFYFEAFTGFSGQSVYDDWYMILFNVVLTSLPVISLGVFEQDVPSEVCLQFPALYQQGPKNLFFDWYRILGWMGNGLYASLIIFFLIVTIFYDQAFRADGQVADMAAVGTTMFTCIIWTVNCQIALTMSHFTWIQHLFVWGSIATWYIFLSLYGMLSXPEYSSRVPAKLLVESXVGPAPIHWVTTLLVAVTCNLPYFAHISFQRCFNPMDHHIIQEIKYYKKDIEDQHMWTXRERSKARQETKIGFTARVEAKIRQLKGRLQKKQSTLAISAPXRDTIHKLTVLGIFRVAYYIV

SEQ ID NO: 22603 - protein, 532 aa, Glycine max
  unsure (1)..(532): unsure at all Xaa locations
EEVSDKIERNLILLGATAVEDKLQNGVPDCIDKLAQAKIKIWVLTGDKMETAINIGFSCRLLRQGMKQIIIHLEIPDIQALEKVGDKMAIAKASRESVHHQISEAAQLLSASRGTCQTSALITAAKDDRXGGKSLTYALEDNMKNMFLELTSHCASVICCRSSPKQKALVTRLVKSGTGKTTLAIGDGANDVGMLQEADVGIGISGVEGMQAVMSSDIAIAQFRYLERLLLVHGHRCYRRMSSMICYFFYKNITFGFTLFLYEVYASFSGQPAYNDWFLSLYSVFFSSLPVIALGVLDQDVSAMYCLKFPILYQEGVQNVLFSWRLILSWMLNGFISATMIFFFCTKAIVPQAFDEEGRTAGRDMLAVTMYTCVVWVVNLQMALAIRYFTLIKHIFIWGSIAYWYLFLMVYGAMPPNISTNVYKVFIETLAPSPSFWIVTFFVAISTLIPYVSCSVIQMWFFPMYHQMVQWIRYERKTNGPEXXYSDVMRQKSLRPTEFNSTFXQLRLTIVDRITNHRXYMYNCILTCKRVY

SEQ ID NO: 22604 - protein, 486 aa, Glycine max
  unsure (1)..(486): unsure at all Xaa locations
MKQFVISSETDAIREVEDRGDQVEIARVIIEQVKRELKKCLEEAQSSFQSLSGPKLALVIDGXCLMYALDPSLRVMLLNLSLNCHAVVCCRVSPLQKAQVTSMVKKGAQKITLSIGDGANDVSMIHVSHVGVGISGMEGMQAVMASDFAIAQFRYLADLLLVHGRWSYLRICKVVIYFFYKNLTFTLTQFWFTFQTGFSGQRFYDDWFQSLYNVIFTALPVIIVGLFDKDVSSSLSKKYPQLYMEGIRNVFFKWKVVAIWAFFSVYQSLIFFYFVSSTNLSAKNSAGKIFGLWDVSTMAFTCVVITVNLRLLMICNSITRWHYISVGGSILAWFLFIFIYSGISTPYDRQENIYFVIYVLMSTFYFYVMLFLVPVAALFCDFVYQGVQRWFFPYDYQIIQEMHRDEVDSSRAQLLEIGNQLTPDEARSYAISQLPRELSKHTGFAFDSPGYESFFAAQLGVYAPPKAWDVARRASMRSRSKTGQQK

SEQ ID NO: 22605 - protein, 425 aa, Glycine max
  unsure (1)..(425): unsure at all Xaa locations
PRVRSYFMIEDRDMYDASSGSRFQCRSLNINEDLGQIRYVFSDKTGTLTENKMEFQRASVHGKNYGSSLPMVDNTAAEDVIPKRKWKLKSEIAVDSELMTLLQKDSNREEKIAANEFFLTLAACNTVIPILSDDGFSNTRRIDYQGESPDEQALVSAASAYGYTLFERTSGHIVIDVNGEKLRLDVLGLHEFDSVRKRMSVVIRFPHNAVNGSSSSRIASSGSSLENGSESNIWHATESHLNEYSSQGLRTLVVASRDLSDAELEEWQSKYEEASTSLTDRATKLRQTAALIESNLKLLGATGIEDKLQEGVPEAIEALRQAGIKVWVLTGDKQETAISIGLSCKLLSGDMQQITINGTSEVECRNLLADAKAXIWRETIKWRASESEDKTNEGTNAPLALIIDGNSLVYILEXELESELFDLHF

SEQ ID NO: 22606 - protein, 421 aa, Glycine max
  unsure (1)..(421): unsure at all Xaa locations
XGXCLMYALDPSLRVMLLNLSLNCHAVVCCRVSPLQKAQVTSMVKKGAQKITLSIGDGANDVSMIHVSHVGVLRSGMEGMQAVMASDFAIAQFRYLADLLLVHGRWSYLRICKVVIYFFYKNLTFTLTQFWFTFQTGFSGQRFYDDWFQSLYNVIFTALPVIIVGLFDKDVSSSLSKKYPQLYMEGIRNVFFKWKVVAIWAFFSVYQSLIFFYFVSSTNLSAKNSAGKVFGLWDVSTMAFTCVVITVNLRLLMICNSITRWHYISVGGSILAWFLFIFIYSGISTPYDRQENIYFVIYVLMSTFYFYVMLFLVPIAALFCDFVYQGVQRWFFPYDYQIIQEMHRDEVDSSRAQLLEIGNQLTPDEARSHAISQLEISKXAFDSPGYESFFAAQXAGRRASMRSRSKIGQQKISGVGSLYIA

SEQ ID NO: 22607 - protein, 463 aa, Glycine max
  unsure (1)..(463): unsure at all Xaa locations
MTFKFHLILDLALVTPQSSQLRRVIKGNILSQITNASQMIKLEKDPHAAFALIIDGKTLTYALEDDVKHQFLGLAVGCASVICCRVSPKQKALXTRLVKEGTGKTTLAIGDGANDVGMIQEADIGVGISGVEXXVMAXDFAIAQFRFLERLLVVHGHWCYKRIAQMICYFFYKNIAFGLTILYFEAFAGFSGQSVYDDWYMILFNVFLTSLPVISLGVFEQDVPSEVCLQFPALYQQGPKNLFFDWYRILGWMGNGLYSSLVIFFLVIIIFXDQAFCVNGQIADMAAVGTMMFTCIIWAVXCQIALTMSHFTWIQHLVVWGSITTWYIFLLLYGMLPPQYSKSAYQLLIEVLAPAPIYWTATLLVTIACVLPYLAHISFQRCFNPMDHHIIQEIKYYKKXXEDQHMWTRERSKARQVTKIGFTARVEAKIRHFKGKLQXKQQSSLGALSPSXXLQNNFSFQSF

SEQ ID NO: 22608 - protein, 365 aa, Glycine max
  unsure (1)..(365): unsure at all Xaa locations
XDKLVLRLEXEIQALEKDGDKMAIAKASMQSVHLQISEGAAQLTAYRGSSHQAFALIIDGKSLVYALEDNMKNLFLELAIRCASVICCRSSPKQKALVARLVKSGAGKTTLAIGDGANDVGMLQEADIGVGISGVEGMQXYLERLLLVHGHWCYRRISSMICYFFYKNITFGFTLFLYEVYASFSGQPAYNDWFLSLYNVFFSSLPVIALGVFDQDVSARYCLKFPLLHQERVQNVLFSWHRILSWMLNGFISALIIFFFCTKAMELQAFDVEGRTAGKDILGAAMYTCVVWVVNLQMALAVSYFTMIQHFFIWGSILLWYLFLVVYGAMPPHFSTNAYKVLIEALAPSPSYWIVTLFVVIFTLI

SEQ ID NO: 22609 - protein, 582 aa, Glycine max
  unsure (1)..(582): unsure at all Xaa locations
ADAGLMTLIFAYRELDEEEYNLFNEEFMVPNTLESTDREQIWNTITGXRTERLVLLGVTVADGIEQSQLPECIXMVANLRISIWFLSDFNMWMPLNIRLSXSLVRPXMKXIISGGSSXYPQVHLSCVGGXLPNGIIYQLVNXQLTYGKELHAXTDENSEALVLIIDGKSLTYALEDDVKDLFLTLAAGCASVVCCRSSPKQKALVTRWVKVKTGSTTLALGDGANDVGMLQEADIGIGISGVERIQADMSSDIGSSQCLFLDRLLQKSXNIQSFXSSQMISYFFYKKIAFGFTLFFYEIYAAFSGRAAFHGWHRSLFFVVFASLPAAAWRVSVQDASASLRLVGPLFYQEGVQNVLFSWKRILGWAFNGVLSATIIFFFCINGMENQAFRKAGEVADLEVLGATMYTCVVWVVNSQMALSISYFTYIQHLFIWGGILFWYIFLLVYGTMDPSLSTTAYKVLIEACAPAPSYWLITLLVLVASLLPYFAYASIQMRFFPTFHQMIQWIRNDGQTTDPEYVNIVRQRSIRHTTVGFTARFEASHSSGASKSIQVXKQCXQLSNVFSVSLLYLKFFGLNIGENLV

SEQ ID NO: 22610 - protein, 285 aa, Glycine max
  unsure (1)..(285): unsure at all Xaa locations
SIYLIPISLYVSIEIVKVLQSVFINQDVHMYYEETDKPAHARTSNMNEELGQVDTILSDKTGTLTCNSMEFIKCSIAGVAYGQRVTEVERALSGRHESHXXGQVLEKISESKSSIKGFNFMDERVMNGNWIKEPNANVIQNFLQLLAVCHTAIPEVDEETGKVSYEAESPDEAAFVIAARELGFEFYERTHTTISLHELDPISGQKINRSYKLLNILEFTRARKRMSVIVRDAEGKLLLLSKGADSVMFERIAKNGRDFEEKXKQHISEYADSGLRTLILAYREX

SEQ ID NO: 22611 - protein, 209 aa, Glycine max
  unsure (1)..(209): unsure at all Xaa locations
XLGIRLEELMKXMKILYXIDYQGESPDEQALVSAASAYGYTRFERTSGHIGIDVNGEKLRLDVLGLHEFDSVRKRMAGGIRVPDNAVKGLVKGADTSMVSILENGRDNNIWHATRSHLNEYSSQGLRTLVVASTDLSGAELEEWQSRYEEASTSLTDRATKLRQTAALIESNLKLLGATGIEDKLQEGVPEAFEALLQAGIKVWVLTGD

SEQ ID NO: 22612 - protein, 210 aa, Glycine max
  unsure (1)..(210): unsure at all Xaa locations
TLYFCDLYCNGAQRHITIQXISLLTIEHQGIRCXDFDGSFMILXAIKASVIHQLTNGKELLAESDENSEALALIIDGKSLTYALEDDVKDLFLTLAAGCASVVCCRSSPKQKALVTRWVKAKTGSTTLAIGDGANDVGMLQEADIGIGISGVEGMQAGMSSDIALAQFHFLERLLLVHGHWCYRTLSSVISYFFYKNIGFGFTLFFYEIX

SEQ ID NO: 22613 - protein, 181 aa, Glycine max
  unsure (1)..(181): unsure at all Xaa locations
XIMIIRKXKLHXGGGVFDYSKWRDLKVGDVVRVEKDEFFPADLILLASNYDDAICYVETMNLDGETNLKLKQALEATSKLHEDSNFQNFRAVIKCEDPNANLYTFVGSMELEDQQYPLAPQQLLLRDSKLRNTDFVYGVVIFTGHDTKVMQNATDPPSKRSXIEKRMDKIIYCLFFDLFNX

SEQ ID NO: 22614 - protein, 237 aa, Glycine max
  unsure (1)..(237): unsure at all Xaa locations
XLVNSASSAEDILFXYLSKAGLTSAESAREHISEYACSGLRTLLLADRELNEEEYKKFSKDPRVRKNLVSEDQEQIVEGIIQNIEKDLILLGATAVEDKLQDGVPECIDKLAQAGIKLWVLTGDKMETAINIGFACSLLRQGMKQIIISSDTPETKSLEKMEDKSAAEAAIKSSVLRQLRESKALLSTADENYEALALIIDGKSLTYALEDDVKDLFLELAIGCASVICCRSSPKQX

SEQ ID NO: 22615 - protein, 372 aa, Glycine max
  unsure (1)..(372): unsure at all Xaa locations
XFGSSLKSCDYRTLAIGDGGNDVRMIQQADIGVGISGREGLQAARAADYSIGKFRFLKRLILVHGRYSYNRTAFLSQYSFYKSLLICFIQILFSFISGVSGTSLFNSVSLMAYNVFYTSVPVLVSVLDKDLSEKTVMQHPQILFYCQAGRLLNPSTFAGWFGRSLFHAIVVFVISIHAYAYDKSEMEEVSMVALSGCIWIQAFVVTMETNSFTILQYMAIWGNLAAFYVINWIFSALPSSGMYTIMFRLCRQPSYWIAIFLMVAAGMGPILAIKYFRYTYRPSKINALQQAERLGGPILSLGTIEPQLRSVEKDVSTLSITQPKTRNPVYEPLLSDSPNATRRSFGAGTPFDFFQSQSRLSLSSYTRNCKDN

SEQ ID NO: 22616 - protein, 235 aa, Glycine max
  unsure (1)..(235): unsure at all Xaa locations
XKAEEIELETVVTSKGDEDQKXXAIKGFGFEDDRLMNCNWLQEPNADDLLMFFRILAVCHTAIPELNEETGVYTYEAESPDEGAFLVAAREFGFEFCRRTQSSIFIHERFSASRKVVEREYKLLNLLDFTSKRKRMSVIVRDEEGSLFLFCKGADSIIFDRLSKNGKHYLEATTRHLNEYGEAGLRTLALAYRKLDEQEYTAWNNEFQKAKAAVGADRDSMLERVSDMMEKGLIL

SEQ ID NO: 22617 - protein, 340 aa, Glycine max
  unsure (1)..(340): unsure at all Xaa locations
TISPSKRSTIEKKMDYIIYTLFTVLILISFISSIGFVFKTKYQTPKWWYLRPGNIEYQFDPGKLGLAGMSHLITALILYGYLIPISLYVSIEFVKVLQATFINQDIQMYDDESGTPAEARTSNLNEELGQVDXTILSDKTGTLTCNQMDFLKCSIAGTAYGVRSSEVELAAAKQMASDLEEQELNLSNFPMRKXRVTCHGKISQKXXEETELGTAVTSKDDGARRPAIKGFGFEDDRLMNGNWLKEPNADVLLLFFRILAVCHTAIPELNEETESCTYEAESPDEGAVLVAAREFGFEFYRRTQSSVAICERFSASGHEVHREYKILNLLDFTSIRXRMX

SEQ ID NO: 22618 - protein, 278 aa, Glycine max
  unsure (1)..(278): unsure at all Xaa locations
MKRYVYIDDDESSHDIYCDNRISNRKYTVLNFLPKNLWDEVSRVMNQYFLLIACLQLWPLITPVNPVSTWGPLIFIFAVSASKEAWDDYNRYLSDKKANEKEVWVVKKGIKKHIQAQDVHVGNIVWLRENDEVPCDLVLIGTSDPQGVCYIETAALDGETDLKTRVIPSACMGIDVDLLHKIKGVIECPYPDKDIRRFDANXMRLVPPFIENEICPLTIKNTILQSWYLRNTEWACGVAVYTGNETKMGXCVRGIPEPKLTAMDAMIDKLXTGAIFIX

SEQ ID NO: 22619 - protein, 196 aa, Glycine max
  unsure (1)..(196): unsure at all Xaa locations
TVRMARRIVXAREFVSKGVLHRVRKNLVSEDQEQIVEGIIQNIEKDLILLGATAVEDKLQDGVPECIDKLAQAGIKLWVLTGDKMETAINIGFACSLLRQGMKQIIISSDTPETKSLEKMEDKSAAEAAIKSSVLRQLRESKALLSTADENYEALALIIDGKSLTYALEDDVKDLFLELAIGCASVICCRSSPKQX

SEQ ID NO: 22620 - protein, 204 aa, Glycine max
  unsure (1)..(204): unsure at all Xaa locations
XAGILAFTKLTPYTAVSAILPLSIVIGATMVKEGIEDWRRKKRDTEVNNRRVIVLKADGTFEYTAWKNLRVGNIVKVEKDEFFPADLLLLSSSYEDAVCYVETMNLDGETNLKLKQGLEVTSSLQEDLNFLKFKATVKCEDPNANLYSFVGSMEFEEKNYALFHQQLILRDFKLCNTYYIFGAVIFTVHDTYGNQNYTDPPXKX

SEQ ID NO: 22621 - protein, 307 aa, Glycine max
  unsure (1)..(307): unsure at all Xaa locations
XFGSSFTLTQFWFTFQTGFSGQRFYDDWFRSLYNVICTALPVIIVGLFDKDVSSSLSKKYPELYMEGIRNVFFKWKVVAIWAFFSVYQSLIFFYFVSTTNLSAKNSAGKVFGLWDVSTMAFTCVVITVNLRLLMICNSITRWHYISVGGSILAWFIFIFIYSGISTPYDRQENIYFVIYVLMSTFYFYVMLLLVPIAALFCDFVYQGVQRWFFPYDYQIIQEMHRDEVDSSRAQLLEIGNQLTPAEARSHAISQLPREISKHTGFAFDSPGYESFFAAQLGVYAPPKAWDVARRASMRSRSKTGQQK

SEQ ID NO: 22622 - protein, 247 aa, Glycine max
  unsure (1)..(247): unsure at all Xaa locations
XIPISLYVSIELVKVLQSIFINHDQEMYYEETDRPARARTSNLNEELGQVDTILSDKTGTLTCNSMEFVKCSIGGIPYGRGMTEVEKALARRGKDVESEVDGGSSDLLGQSNDFVDSRHPIKGFNFRDERIMNGQWVNEPYTDFIQRFFRVLAICHTAIPDVDKESREISYEAESPDEAAFVIAARELXGFEFFARTQTSISLHELNYESGKKVDXRVYQLLHVFRSQQFPQRMSVIVRNEENQLLX

SEQ ID NO: 22623 - protein, 169 aa, Glycine max
  unsure (1)..(169): unsure at all Xaa locations
XQGIYFSXRKSFTDIEVNNRRVKLHEGDGIFKYTEXKNLRVGNIVKIMKDEFFPADLLLISSSYEDAVCYVETMNLDGETNLKIKQGLDVTSSLQEDFKFHDFRAVIKCEDPNANLYSFVGSMDFGEXXYPLSAQQLLLRDSKLRNTDYVFGAVIFTGHDTKVIQNSTD

SEQ ID NO: 22624 - protein, 156 aa, Glycine max
  unsure (1)..(156): unsure at all Xaa locations
ADAGLRTLILAYRELDEEEYNLFNEEFMEAKNLVSADRDQIGEEISEKIEKDLILLGVTAVEDKLQNGVPECIDKLAQAGIKLWVLTGDKMETAINIGFACSLLRQGMKQIIISSDTTETKSLEKMEDKSAAAVAIKASVIHQLAKGKELLAESDX

SEQ ID NO: 22625 - protein, 220 aa, Glycine max
  unsure (1)..(220): unsure at all Xaa locations
VLQSIFINQDIHMYYEETDKPALARTSNLNEELGQVDTILSDKTGTLTMNSMEFIKCSVAGVAYGRGVTEVEQAMGKSNGLPIFHEHINGLESKLNEIRDSPDRKEPIKGFNFTDERIMNGNWVNEPYADVIQNFFRLLAICHTAIPEVDEETGNVSYEAESPDEAAFVIAAREVGFKFYKRTQTCLSIYELXDPASGNEVERSAMLLCVLIFNTVVFFS

SEQ ID NO: 22626 - protein, 163 aa, Glycine max
QEYFIQFHRVAYVYFLAMAALNQLPPLAVFGRTVSLFPLLFVLCVTAIKDAYEDWRRHRSDRNENNRECLVLQSAQFCPKKWKNIQAGDVIKISADEMIPADMVLLGTSDPSGIAYIQTMNLDGESNLKTRYAKQETASAVSDACAVSGVIRCEPFCRLLAAV

SEQ ID NO: 22627 - protein, 150 aa, Glycine max
  unsure (1)..(150): unsure at all Xaa locations
LDSRLTHAXELIENDLILIGSTAIEDKLQEGVPACIETLQRAGIKIWVLTGDKIETAINIAYACNLINNEMKQFVISSETDEIREVEDRGDQVXIARFIKEEVKRELKKCLEEAQSSFHPYLGPXLAPVVDGKCLMYALDPSLRVMLLNX

SEQ ID NO: 22628 - protein, 187 aa, Glycine max
  unsure (1)..(187): unsure at all Xaa locations
XYKNIAFGFTLFFFEMYASFSGQAAYNDWFMSLYNVFFTSLPVIALGVFDQDVSSKLCLKFPLLYQEGTQNILFSWKRIIGWALNGVVTSAIVFFFCIRSMEYQAFRKGGEVMGLEVLGATMYTCVVWVVNCQMALSISYFTYIQHIFIWGSILFWDIFLLAYGAIDPSFSTTVYKVFIEALAPAPX

SEQ ID NO: 22629 - protein, 1160 aa, Oryza sativa (japonica cultivar-group)
MRPASASAADERPLVELTSAAATAPASTETSTFSSAPGFTRAVRCSGAGSSSSSSSSSDEGGGGVYPGNAISTTKYTAASFVPKSLFEQFRRAANCFFLVVACVSFSPLAPYRAVSVLLPLVVVVGAAMAKEAVEDWRRKQQDIEVNSRKVEVYDGTQSFHQTEWKKLQVGDIVKVKKDEFFPADLVLLSSSYEDGICYVETMNLDGETNLKRKQSLDVTAGLNEDHSFHTFKAFIQCEDPNEKLYSFLGTLHYNGQQYPLSPQQILLRDSKLRNTNQIYGIVIFTGHDTKVMQNAMEPPSKRSSVERRMDKIIYLLFVILFAIASFGSVMFGIRTRAELSAGNYAWYLRPDNSTMYFDPNRATLAAICHFLTSLMLYVCLVPISLYISIEIVKVLQSTFINQDQNMYCEESDKPARARTSNLNEELGQVHTILSDKTGTLTCNSMEFLKCSIAGVAYGNRPIEVQMPYGGIEEECVDIGQKGAVKSVRPVKGFNFTDDRLMNGQWSKECHQDVIEMFFRVLAVCHTAIPVADRTSGGMSYEAESPDEGALVAAARELGFEFYHRSQTSISVHEYDPVFGRKVDRTYKLLNTLEFSSARKRMSVIVSTEEGRLFLFCKGADSVILERLSKDNSKACLTNTKCHIDEYSEAGLRTLALAYRELTEDEYVAWNMEYSAAKNSVHNDHDVAVEKASENIEKDLVLLGATAVEDRLQKGVPECIHKLAQAGIKIWILTGDKLETAVNIGYACNLLRKGMEEVYITLDNPGTNVPEEHNGESSGMAPYEQIGRKLEDARRQILQKGTSAPFALIIDGNALTHALMGGLKTAFLDLAVDCASVLCCRISPKQKALITRLVKNRIRKTTLAIGDGANDVGMLQEADIGVGISGAEGMQAVMASDFAIAQFRFLERLLLVHGHWCYRRIAAMICYFFFKNITFGFTLFWFEAHAMFSAQPGYNDWFISFYNVAFTSLPVIALGVFDKDVSSRVCLEVPSLHQDGVNNLFFSWSRILSWMLNGVCCSIIIYFGALHAVLIQAVRQDGHVAGFDILGVTMYTCVVWTVNCQLALYISYFTWIQHFVIWGSILIWYTFLVIYGSFPPTISTSAYHVFWEACASSPLYWLSTLVIVVTALIPYFLYKITQSLFCPQHCDQVQRPNSKELVAQ

SEQ ID NO: 22630 - protein, 1175 aa, Oryza sativa (japonica cultivar-group)
MASGRPLLDASPRPTQQPPASSLLPPPQPEPPLRADRLAFSLEVPDPFRREPDPSSAASQRGEEEGGGEEESRAVVVGEPSSSEAAAGFAGNGVRTAKYSVLTFLPRNLFEQFRRLSYVYFLAITVLNQLPQVAVFGRGASVLPLAFVLFVTAVKDAYEDLRRHRSDRQENNRLARVLLAPPAAGEFAPKKWKHIRVGDVVRVASSETLPADMVLLATSDPSGVAHVQTVNLDGETNLKTRYAKQETQLRFSQDGGIGGVLHCERPNRNIYGFQANLEIDGKRVSLGPSNIVLRGCELKNTTWAIGVVVYAGKETKVMLNSSGAPSKRSRLETQLNRETVILSIMLIGMCTTASVLAGIWILNHRGDLEFTQFFREKDYTTGKNYNYYGMGMQIFITFLMAVIVYQVIIPISLYISMELVRLGQAYFMGADRDLYDESSRSKFQCRALNINEDLGQIKYVFSDKTGTLTENKMEFQCASIRGVDYCSGKDSCGYSVVVDDLLWTPKMAVKIDHRLLKLLRGGGTDEETKLVLEFFLALAACNTIVPLVLDTRDSKQKLIDYQGESPDEQALVYAAASYGIVLVERTSGYVVIDVLGDRQRFDILGLHEFDSDRKRMSVIVGCPDKTVKLYVKGADSSLFGITKNSLDLDIVRATEAHLHKYSSFGLRTLVIGMRELSQPEFEEWQLAYENASTSVLGRGNLLRSVAANIENNIRILGATGIEDKLQDGVPETIESLRQADIKVWILTGDKQETAISIGYSCKLLTNDMTQIVINNNSKESCKRSLEEAHATIKKLRIASTGTQSPELASESAGVTLALIVDGNSLVYILETELQEELFKVARECSVVLCCRVAPLQKAGIVALIKNRTDDMTLAIGDGANDVSMIQMADVGVGISGQEGRQAVMASDFAMGQFRFLVPLLLVHGHWNYQRMSYMILYNFYKNATFVLVLFWYVLYTAFTLTTAITEWSSLLYTVLYTSLPTIVVGILDKDLSKETLLAYPKLYGSGQRDEKYNVNLFVLNMLEALWQSLVVFYMPYFAYRQSTIDMSSLGDLWALAPVIVVNMLLAMDIFRWNWIVHAFVWGTIAATTICLFVIDSIWFLPGYGAIFHIMGTGLFWLLLLIIVVAAMVPHFVIKAFTEYFTPSDIQVAREIEKFENVNQVNRSEVPMTRLHDPRR

SEQ ID NO: 22631 - protein, 1185 aa, Oryza sativa (japonica cultivar-group); identical to SEQ ID NO: 622

SEQ ID NO: 22632 - protein, 1158 aa, Dictyostelium discoideum
MLKERKKSTDNGKESNNSSTNCYTLFLNDSKQTHSQTGKKFPKNFIRTTKYTILSFIPKNLFEQFRRLSNFYFLCVLIIQLVPQISPLLPLTSILPLSFVLIITATKEALEDYNRYQSDKKNNLEPYTIVRDAKLETISSQDICVGDIIRIQNGQQIPADLVLISTSHDEGLCYVETSNLDGETNLKVRKALGDTNKLSTAEDISLLRGSIVYETPNERLYRFNGRIVIQGKENIIHSLNHTMFLQRGSQLRNTKFIFGVCVYAGVDTKLFLNQQPPPSKFSTVEKLLNKLILFVFIFQLIVCLLCAVASAFYQEIVVEDMLYLGPTVSLSIYGVRNFFTYFILFNTMIPISLWVTLEMVKVGQAKFMEFDSYMRSQVLTIDPATGEEKEVEKGCKAKTSNLNEDLGRIQHIFSDKTGTLTENIMRFCKCSIGSDIYDERESSGSLVRALDASRDSSSNPKILINGTNNTKFQTIQSFLRILSLCHTVISEVDEATGNITYQSQSPDELALVHTASNNGFVFLDRRTDEILLRENGVDTSYGLLAILEFSSARRRMSVIVRTPEGTIKLLTKGADMSISCRLLNDKERNAARDETLNFLKNFSRDGYRTLMVAERDLTVEEYEDWKQQFFQASTSIENREEKIEAVCELIEKDLSLVGTTAIEDKLQNQVPETISYLLNAGLHIWVLTGDKQETAVNIGYSCRLFDPAMELIFVNTESSEECGLILDRYIALLPPENENEDVKDTQTYGQQQMQQGMNGATPGIMNMISNSLQSGSGNKTPIIDIIIPTLAVEYGLVIDGHTLTFALNDHKEKFLRLGRACKSVICCRTTPLQKALVVRVVKQSEKKISLAIGDGANDVSMIQEAHVGIGIFGKEGTQAARASDYCIHQFSHLKRLLCVHGRYSYIRVSGLIQYSFYKNMSFTLCLLWFSFSSLFTGQTIFDSWIITFYNILFTSLPPFFYGLFEKDIDEESIMENPNLYKSIQQSQILSKKSFFVWNLLGLWHSLVTFFGVKLLFVNDVMSSNGHVAGIWTLGTLVSTASILTVNVRMAIETKLWNYISLVGMIISLAAYFIMLVLYAFFLPLNSNMYDIFSSQLETGSYYFTIIVIIIVAIFPDFCIKYYSRMYAPKDTQLEKERKGLKGVKEYQREMKEFNNQRA

SEQ ID NO: 22633 - protein, 1829 aa, Dictyostelium discoideum
MSNYNGDYHYNNEQQQQNHHQQYRLTTDNSAILNGGVSYDLLDSTNSARSNNPLLQGMGYEEDTFEEQQQQEIYSNNDNSGNNNSNNNNGASDKSYFTIYGNINNDAHNQTLTQHTDLEHVDLESDSKNIKYQQQQQQHQHQQHQQYQQQHQQHQQQNNNNNNNGYINPHLTESSQLFSSVPLNSLPNSPYHINYPYTNNNSNSNNSYNNTNSNNNNNGNDVYSENNNSNNNNNNSNNKKKYKKKSKRNIFKKKQDKESDLNKSNTPIIIKDNDDDDDNNNNNNEDNNDDNQRNSKVFIHKQHQSQVPDQYLAILKASHSAVQRKKRDAIALRVGRQWLTHIITVQTVGNLIRALPIFVLEKYYVMLLIFFQALFLVIGSYGVKRLKPYLILLYVIGCFSTTILDLIMTFTYAHTQSSRPFTEELLAFWSYVLFVSLLCILNIIGGILLGLKLFVSVVSLQDPSDNSLILLTASLVGSFDIERDESASSSSSQAKASRCIFFYGSDVKKAIATTTSITKKLTTGEKIKQYFKLKKLFPKSPFSSGHNNNNYNNNDNNIINNNNNNNGLNNNHNNNNNEQITSSVATSTDKSQLLSMKTNQVITSKYNVFTFIPKVIFYQFSRLANLYTLAIVILCMFSFSPVGPVSSLTPLLVVIAVTSFKELAEDLKRHKQDKEINGRETSIYRPPFYIISPTASKEDLKRRQSGFNGFISRIGNFFGSIKQQYIQTEKNIPMVPDNDYSKVGVFQSCHWEDIKVGDIIYVKNGESLPADIICLSSSRSDGRAYLETANLDGETNLKAKSSISKCQWIKGAKDLDDFSCKVDYEGPNNDIYSFDGVLTILKGFERSNIGDSTVVPTTNYVPVSIDQLLLRGTKLRNTDWVIGVVTYSGVDTKIEKNASKASQKRSSVERGVNNKLLILFLLQTIICIICSIGHNRWHLEDDKDAKPWYIDYDPEQTEDFIYVSYVILYNTLIPLSMYVSMEMIRVSNAHFIDSDLEMYDESTDTPAQARNTNINEELGQIQYLFSDKTGTLTCNEMVFNRCTIGGQVYGPEDSSLQDLRLFIKNQLSDSSNGSYLRQSNGLSGGGSGSGGSGGSGGDASSSLNPLGIPVQPEISIPILSDQTEYIKEFLTCLAICNTVLIEKNKEIDDLMMNHDNSKSHHNFNGGTNSGCSVIPKYQAASPDEESLTLTAARYGFILKSREDNIITISVHGREERFELLNVLEFNSYRKRMSVIVKNQKNQIKIYCKGADSVIFERAKKNTDHCVGILQSTEKHLSEFACSGLRTLCMSVRTIEHEEYIAWNKIHQEASISLVKKAEKVDAACELIEKDLLLIGSTGIEDRLQDHVPETISALREAGIKVWVLTGDKQETAISISTSSAVINEEMELIILNESNKQALMKRLLTISNEKRLHHFNDMSGRWGSVKYLSKLLEKVASKLRLEPSDAPNLLNKSNGMSAPAVNASQKHIAIIIDGSTLALALEPDLRYFFLQVAKTCESVVCCRCSPSQKAKVVNLVAERSFLFGDGAITMSIGDGANDVPMIQKAHVGVGISGREGMQAVLASDFAIANFSMLRRLILVHGNRSYKRMTKLILYSFSKNIALSISQFWFGFFSGFSGQMIYFDFLFTLYNALFTSLPVIFLGTFDQDTKEDDLLNKPYLYRVCQSNSPFSTWKFIWWVFIGMWQSATIFFVTFFVMNTSTIEGGKTLGLWSIGTAAYIYLVVTVNLQISFITRYWTRQTILAVSISVVSTFLFVMLYSVLGRYVEADATHIIFELYALPTFWLLLIIAPSIALLPYIIVSLNSWLFNTDNLSLQKLNLEKKGFIMMNDL

SEQ ID NO: 22634 - protein, 1161 aa, Dictyostelium discoideum
MNLGKLKIRRKKARPSYPIIEIRPNKTTENDVNKSKGYKSNDISTTKYTRYNFIFKNLFEQFKRITNIYFAAICVITLIPQVSPLSPVTSLLPLIFVLVVTALKEAFEDYRRYKADKASNYTQYQVYRDGSFRLIKSKHICVGDFIRIDNDQAFPSDILVLSSNLEDGICYVETSQLDGETNLKLFKAAKETNSLTQEQLLDLNANIECELPNNNLYKFKGKFTLQNDNSTFSLSEKQLMLRGARLRNTHFIIGIVLYCGKDTKLSLNQKNPPSKFSTIETRLGRSVIGIFCFKVVLVIIATVLSSLFEFNTARDSWYLRSDFDSLGFTIVKNFVSYFAILSFLIPMSLMVTLEVVKVSQAKYMEWDVKMSYKENKKYEKQIEQPQEELKIKNEDKTTTTTISPNGDIELSNIVAKKEKSKILNKYMSVKNSNLNDELALIKYIFSDKTGTLTENRMLFSKCSINGTCFDGAMNQQLLDEVTSKTKNEESIREFLLNMSLCHAAVSDVNEETGKITYQSQSPDEIALCDCAKINQFEFINRTSTHAQIRVMGEDKQYQLLAIMEFSSDRRRMSILLREEDENNDNNSTETTPIDDSSTTDIDGNLLTPPPQLTNLKKKGKIILYSKGADSIMMERLSEKESNSELLEQTKEHISQFSREGLRTLILAKREISQEEYSNWSQQYHEASTLIHDREAEMERLNDQIERGFELVGCTAIEDKLQDGVPETIDYLLKANIKVWIITGDKQETAINIGYSCKLLVPEIPIIIINAESTEECGTQIKRAIENFIDPETQVDKKVSMVINGESLTFVLKDHSADFLKIAAKCHSVVACRVTPLQKALIVRLVKKSTKEVCLSIGDGANDVSMIQEAHIGVGIFGNEGTQAARASDYALLRFRHLARLITVHGRYSMVRNSLCIKYSFYKNMAFFLCQFWFSIYSGWTAMTLYDSWIVTTFNILMTSVPPYFMALFEKDVNEKIIPKNPHLFKEVQDCHLFQYRSILNWLIGALYHSVVFFFGLYFFLDGSGDMVNQWGRIGGKELAGSFCATFAVLSILLKAAIEIKHWNFIVHIGIWGSVIVYLVISLVDSSIITQIPNMYWVFIYALHLLKFYVMVIIMIFIALVPDFTLKFVRRHLSPTNSNIEQEKYILNRGKNKNNIDNDEEI

SEQ ID NO: 22635 - protein, 2084 aa, Dictyostelium discoideum
MFQNKEQTESILVWEKIVSIFSIPSQNEILNFKQKSPNNIDNNLKQLFNFVKLYKLESLVLDWYFESIKKYFKSTLSNEFWKFFNNVNLAELDSSTTSGRQLKFINHQFALSINLLHKVFSFFKSNLFLFYELLFKKESYNFNFLIKKLQDLLITNIMLTTNQQTKYFNTILFMFFERDFISFTKSFYHSKKQILKDEEENNNNSKDLEFNDQQQEEEEEEEENEEESKSYIIMEMSFEDSITDINIKEDSFMDLCKKLQDLNFIVISEEIFTQILFKKVFEYIETRCKGVFEKSFLKSILEWADQVIFKWLAMILLSSTTTTKINNYNDIINNNDDDNDDDDDDENKENSLKIFNQWKKRLEFSIYENYSQQRISELFDMIVQYPDSLPSLEDLSICFQKIPIEKTMITNLKRVLHNRLLHPGANTSDIITQYISTIHAMDIIDPSGMVMEKVGKPIREYLSQREDTIRCIISSFTEESNEIYQELCNYDPQDNGGDDDSNNSLLAFGNCDLYVDEGDNFSSIDDFKFWIPNKIDGSSTTISIGNAKANNNNKKKKKKDTISHLVNIYDGIDLFINEYRSMLSDRLLSVVDFDLDKEIKNIELLKLRFGDSVLFNCEIMIKDMVDSKRLNLQIKNSQGVNNNNNNNNNNNNELKEFETLILSQLFWPTLKGDEFKYPKSIEKKMQIYSKEYERIKTPRQLIWKQHLGLVDLDLEIGNNIQSFQVSPIHATLIMLFESDDGDDDDEKELTLEYLSKQLEISKDLVKKKLIFWLNNQIIKETSHETYKINNKEKEEQKQRQQQIENDDQDESSSDDDDDDNNIVVEEEEEEKSTSAKEKEEQMRVVESFIIGMLINFKTLPLERIHSMLTMFNSELYTSTIHELKAFLSKLIYFVIVSVITLIPEVSPLDPSTTILPLGLIVGLTAIKEAYEDFKRYRADKSSNYKEYLIYQLPKPIPQQQQPPLSSSTTPLPQKQQQENYDIESSKFKLIKSKNIKVGDIIKIDNNQSIPADIILLSSSSLGDGVCFVETSELDGESNLKIFKSCNETHSKFKNISLNLNESQQEQQQQFIKLKGNIQCEFPNNNLYKFKGILNLENDNENNNNDNIEENLKTTTTTEITTISLSEKQLLLRGSTLRNTEFIYGIVVYCGRDTKLSLNQKSPPSKYSTVEKMISKSVIGIFIFKMILVIISTIVGTLVTERTTNKSWYLWINEEPDSIGLVIVKTFFAYFAYLSFLVPMSLLITLEIVKVSQGGFMQFDLLMSYKEKQYRKQLLQYEQNQNNQNQNQNQNNGDLELQQQQQQQKQFTKSISSTSISKSISKDNLKSEILKDDDSSGSGRENKIVHKYMTVKNSNLNDELALVKYIFSDKTGTLTENKMIFKKCSIGGKIYQSPNESQLLNEIKNKSSSMELEEIVSEGGETIDQKFVKEFLINMTTCHSAVSELDQDGIAIYQSPSPDEISLLNCSKLNQFIFKERNNGEIKIQILKKEKTFKLLTSMDFTSERRRMSVVLKDIETNKIYLYSKGADSVMMSRLKQDNNINNNNNNINNNGLINYNNQLIIEKTTQHIKEFSNEGLRTLILAMKEIEIDQFNQWFEKYNSILNSIENREEQIEELNNQLENDLTLIGCTAIEDKLQDGVPETIEFLLNSNIKVWIITGDKQETAINIGYSCKLLSHSNQLFIINSNSRDNCEQQLNNIINNLNEIENNNNNNLNNSNNNNNNLNNNNNNYSLVIDGESLIFIFLEFENKFLSIAKKCHSVICCRVTPIQKSLIVKMVKKDTKEVCLSIGDGANDVSMIQEANIGIGIFGNEGSQASRASDYSLLRFRHLSRLITIHGRYSMIRNAACIRYSFYKNMTFFFIQFLFSIHSGWSSQTLFDDAIITSFNTVITAIPPYFMALFEKDVNERVLEKNPHLFLEVQNGKQFQYLTIARSVLGGLYQSVVMYFGLYLLFLDDNILNQYGKIGGLAIMGSYCASFSVISILLQAALDIKYWNFIVHIGIWGSILLYIIIALITNSMLPSMPQSYQVFNFSLSLLQFYLMVIIMIFISLIPTFTSKYIKQQFYPSQSQLLQENYILNKRKRRN

SEQ ID NO: 22636 - protein, 1206 aa, Oryza sativa
MATGGGDGRRRGRRRSKMRLSRLYSFACGRRPTAVDDESSSRIGGPGFTRVVNANGGGGIPEYGYRSNSVSTTKYNVVTFVPKSLLEQFRRVANIYFLISACLTYTNLAPYTSASAVAPLVLVLLATMVKEAIEDWRRKQQDTEVNNRKTKVLQDGAFHSTKWMNLQVGDIVKVEKDEFFPADLILLSSSYEDAICYVETMNLDGETNLKLKQSLEASSGLQEDDSFNSFRAVIRCEDPNPHLYSFVGNIEIEEQYPLSPQQILLRDSKLRNTEYVYGVVIFTGHDTKVMQNAMKAPSKRSKIERKMDRIIYLLLSALVLISVIGSVFFGITTRDDLQDGRPKRWYLRPDDSTIYFKPTKAAISAILHFFTAMMLYGNFIPISLYISIEIVKLLQALFINQDIHMYHEETDTPAHARTSNLNEELGQVDTILTDKTGTLTCNSMEFIKCSIAGTAYGRGITEVERAMAKRKGSPLIADMASNTQGSQAAIKGFNFTDERVMNGNWVSQPHSGVIQMFLRLLAVCHTCIPEVDEESGTISYEAESPDEAAFVVAARELGFTFYQRTQTGVFLHELDPSSGKQVDRSYKLLHVLEFNSARKRMSVIVRNEEGKIFLFSKGADSVMFERLSSSDCAYREVTQDHINEYADAGLRTLVLAYRQLDEAEYANFDRKFTAAKNSVSADRDEMIEEAADLLERKLILLGATAVEDKLQKGVPECIDKLAQAGIKIWVLTGDKMETAINIGYACSLLRQGMTQITITLEQPDIIALEKGGGDKAAVAKASKENVVKQINEGKKRIDGSVVGEAFALIIDGKSLTYALEEDAKGALMDLAVGCKSVICCRSSPKQKALVTRLVKESTGKVSLAIGDGANDVGMIQEADIGVGISGAEGMQAVMASDVSIAQFRFLERLLLVHGHWCYSRISAMICYFFYKNITFGVTLFLYEAYTSFSGQTFYNDWALSTYNVFFTSLPVIAMGVFDQDVSARFCLRYPMLYQEGPQNLLFRWSRLLGWMAYGVASGVIIFFLTSAALQHQAFRRGGEVVDLAILSGTAYTCVVWAVNAQMTVTANYFTLVQHACIWGSVALWYVFLLAYGAITPAFSTNYFMLFTDGLAAAPSYWVVTLLVPAAALLPYFTYSAAKTRFFPDYHNKIQWLQHRGSNADDPEFGHALRQFSVRSTGVGVSARRDARDLHLPPPSQSHSHSQTTST

SEQ ID NO: 22637 - protein, 1206 aa, Oryza sativa; identical to SEQ ID NO: 22636

SEQ ID NO: 22638 - protein, 1175 aa, Oryza sativa; identical to SEQ ID NO: 22630

SEQ ID NO: 22639 - protein, 1185 aa, Oryza sativa; identical to SEQ ID NO: 622

SEQ ID NO: 22640 - protein, 1185 aa, Oryza sativa; identical to SEQ ID NO: 622

SEQ ID NO: 22641 - protein, 868 aa, Oryza sativa
TMFTLITLYSTIIPISLYVSIEMIKFIQCTQFINNDLHMYHAESNTPALARTSNLNEELGQVEYIFSDKTGTLTRNLMEFFKCSIAGEIYGTGITEIEKGGAERAGIKIDEGKRSGAAVHEKGFNFDDARIMCGAWRNEPNPEACKEFFRCLALCHTVLPEGEETPEKISYQAASPDEAALVAASKNFGFFFYRRTPTTVIVRESHVERMGSIQDVAYEILNVLEFNSTRKRQSVVCRFPNGRLVLYCKGADNVVYERLADGNNDIKKISREHLEQFGSAGLRTLCLAYRDLSREQYESWNEKFIQAKSSLRDRDKKLDEVAELIEKDLVLVGCTAIEDKLQEGVPACIQTLSAAGIKIWVLTGDKMETAINIAYACSLVNNDMKQFIISSETDVIREAEDRGDPVEIARVIKESVKQSLKSYHEEARGSLISTPGQKLALIIDGRCLMYALDPTLRVDLLGLSLICHSVVCCRVSPLQKAQVASLVKKGAHKITLSIGDGANDVSMIQAAHVGIGISGQEGMQAVMASDFAIAQFRYLTDLLLVHGRWSYLRLCKVITYFFYKNLTFTPSAHASAFQTGFSGQRFYDDWFQSLYNVIFTALPVIMVGLFDKDVSASLSKKYPKLYQEGIRNTFFKWRVIAVWAFFAFYQSIVFYYFTAAASRYGHGSSGKILGLWDVSTMAFTCVVVTVNLRLLMSCNSITRWHYISVAGSITAWFMFIFIYSAIMTSFDRQENVYFVIYVLMSTFFFYLTLLLVPIIALFGDFLYLSIQRWFFPYDYQVIQEMHRDEPHEYSRIQLPETSHLSPEEARSYAISMLPRESSKHTGFAFDSPGYESFFASQQGVGVPHKPWDVARRASMKQRQKTGGS

SEQ ID NO: 22642 - protein, 733 aa, Oryza sativa
  unsure (1)..(733): unsure at all Xaa locations
DTEVNNRKTKVLQDGAFHSTKWMNLQVGDIVKVEKDEFFPADLILLSSSYEDAICYVETMNLDGETNLKLKQSLEASSGLQEDDSFNSFRAVIRCEDPNPHLYSFVGNIEIEEQYPLSPQQILLRDSKLRNTEYVYGVVIFTGHDTKVMQNAMKAPSKRSKIERKMDRIIYLLLSALVLISVIGSVFFGITTRDDLQDGRPKRWYLRPDDSTIYFKPTKAAISAILHFFTAMMLYGNFIPISLYISIEIVKLLQALFINQDIHMYHEETDTPAHARTSNLNEELGQVDTILTDKTGTLTCNSMEFIKCSIAGTAYGRGITEVERAMAKRKGSPLIADMASNTQGSQAAIKGFNFTDERVMNESPDEAAFVVAARELGFTFYQRTQTGVFLHELDPSSGKQVDRSYKLLHVLEFNSARKRMSVIVRNEEGKIFLFSKGADSVMFERLSSSDCAYREVTQDHINEYADAGLRTLVLAYRQLDEAEYANFDRKFTAAKNSVSADRDEMIEEAADLLERKLILLGATAVEDKLQKGVPECIDKLAQAGIKIWVLTGDKMETAINIGYACSLLRQGMTQITITLEQPDIIALEKGGGDKAAVAKASKENVVKQINEGKKRIDGSVVGEAFALIIDGKSLTYALEEDAKGALMDLAVGCKSVICCRSSPKQKALVTRLVKESTGKVSLAIGDGANDVGMIQEADIGVGISGAEGMQAVMASDVSIAQFRFLERLLLVHX

SEQ ID NO: 22643 - protein, 787 aa, Oryza sativa
  unsure (1)..(787): unsure at all Xaa locations
MIKFIQCTQFINNDLHMYHAESNTPALARTSNLNEELGQVEYIFSDKTGTLTRNLMEFFKCSIAGEIYGTGITEIEKGGAERAGIKIDGDEGKRSGAAVHEKGFNFDDARIMCGAWRNEPNPEACKEFFRCLALCHTVLPEGEETPEKISYQAASPDEAALVAASKNFGFFFYRRTPTTVIVRESHVERMGSIQDVAYEILNVLEFNSTRKRQSVVCRFPNGRLVLYCKGADNVVYERLADGNNDIKKISREHLEQFGSAGLRTLCLAYRDLSREQYESWNEKFIQAKSSLRDXXCSLVNNDMKQFIISSETDVIREAEDRGDPVEIARVIKESVKQSLKSYHEEARGSLISTPGQKLALIIDGRCLMYALDPTLRVDLLGLSLICHSVVCCRVSPLQKAQVASLVKKGAHKITLSIGDGANDVSMIQAAHVGIGISGQEGMQAVMASDFAIAQFRYLTDLLLVHGRWSYLRLCKVITYFFYKNLTFTLTQFWFTFQTGFSGQRFYDDWFQSLYNVIFTALPVIMVGLFDKDVSASLSKKYPKLYQEGIRNTFFKWRVIAVWAFFAFYQSIVFYYFTAAASRYGHGSSGKILGLWDVSTMAFTCVVVTVNLRLLMSCNSITRWHYISVAGSITAWFMFIFIYSAIMTSFDRQENVYFVIYVLMSTFFFYLTLLLVPIIALFGDFLYLSIQRWFFPYDYQVIQEMHRDEPHEYSRIQLPETSHLSPEEARSYAISMLPRESSKHTGFAFDSPGYESFFASQQGVGVPHKPWDVARRASMKQRQKTGGS

SEQ ID NO: 22644 - protein, 815 aa, Oryza sativa
  unsure (1)..(815): unsure at all Xaa locations
MASGRPLLDASPRPTQQPPASSLLPPPQPEPPLRADRLAFSLEVPDPFRREPDPSSAASQRGEEEGGGEEESRAVVVGEPSSSEAAAGFAGNGVRTAKYSVLTFLPRNLFEQFRRLSYVYFLAITVLNQLPQVAVFGRGASVLPLAFVLFVTAVKDAYEDLRRHRSDRQENNRLARVLLAPPAAGEFAPKKWKHIRVGDVVRVASSETLPADMVLLATSDPSGVAHVQTVNLDGETNLKTRYAKQETQLRFSQDGGIGGVLHCERPNRNIYGFQANLEIDGKRVSLGPSNIVLRGCELKNTTWAIGVVVYAGKETKVMLNSSGAPSKRSRLETQLNRETVILSIMLIGMCTTASVLAGIWILNHRGDLEFTQFFREKDYTTGKNYNYYGMGMQIFITFLMAVIVYQVIIPISLYISMELVRLGQAYFMGADRDLYDESSRSKFQCRALNINEDLGQIKYVFSDKTGTLTENKMEFQCASIRGVDYCSGKDSCGYSVVVDDLLWTPKMAVKIDHRLLKLLRGGGTDEETKLVLEFFLALAACNTIVPLVLDTRDSKQKLIDYQGESPDEQALVYAAASYGIVLVERTSGYVVIDVLGDRQRFDILGLHEFDSDRKRMSVIVGCPDKTVKLYVKGADSSLFGITKNSLDLDIVRATEAHLHKYSSFGLRTLVIGMRELSQPEFEEWQLAYENASTSVLGRGNLLRSVAANIENNIRILGATGIEDKLQDGVPETIESLRQADIKVWILTGDKQETAISIGYSCXXNDVSMIQMADTRGQGNKHQLGHSSXLHQRSNIFGSSCRSAWAGTDPSGSVLX

SEQ ID NO: 22645 - protein, 339 aa, Oryza sativa
  unsure (1)..(339): unsure at all Xaa locations
XEFPGRPTRPHVLNRKWLQVGKLEKDPDAAFALVIDGKALTFALEDDMKHMFLNLAIECASVICCRVSPKRKWLVTRLVKEGIGKTTLAIGDGANDVGMIQEADIGVGISGVEGMQAVMASDFSISQFRFLERLLVVHGHWCYKRIAQMICYFFYKNIAFGLTIFYFEAFAGFSGQSVDDDWFMLLFNVVLTSLPVISLGVFEQDVSSEICLQFPALYQQGPRNLFFDWYRILGWMANGLYSSLAIFFLNICIFYDQAIRSGGQTADMAAVGTTMFTCIIWAVNMQIALTMSHFTWIQHLFVWGSVGTWYLFIIVYGXXALRSRDNYQILLEVLGPAPX

SEQ ID NO: 22646 - protein, 260 aa, Oryza sativa
  unsure (1)..(260): unsure at all Xaa locations
XPRVRPRVRNSALIDREWKVAEVCQKLEHSLEILGVSAIEDRLQAGVPETIEILRQSGINFWMLTGDKQSTAIQIALLCNLISSEPKGQLLYINGRTVDEVARSLERVLLTMRITTSEPKELAFVVDGWALEIILSRYNEAFTELAALSKTAICCRVTPSQKAQLVKLLKSCDYRTLAIGDXGNDVRMIQQADIGVGISGREGLQAARAADYSVGKFRFLKRLILVHGRYSYNRTAFLSQYSFYKSLLICFIQILFSFLX

SEQ ID NO: 22647 - protein, 290 aa, Oryza sativa
  unsure (1)..(290): unsure at all Xaa locations
XSFITTEYMVTLDLAKGVYAKFIDSNVRSGNMYACSFRNARFLDAVSRNDPDIAKFLMVMALCSTVVPIKRNDGTITYQAQSQDEEALVTAASKLNMVLASKDSNTAEISFNGCKFYYDLLDILEFTSDRKRMSAVVKDVQSGKILLLSKGADEAILPRCHQGQQIRTYLETVEMYSQLGLRTLCLGWRELEEDEYKDWSKTFQDASCSLENRERKIAEVCHRLEQDLQILGVSAIEDRLQDGVPETIKLLKSAGINVWMLTGDKQHTAIQIGLLCNLIAPGTALSLEIX

SEQ ID NO: 22648 - protein, 289 aa, Oryza sativa
  unsure (1)..(289): unsure at all Xaa locations
MGSRIKEMVRVATARLGGEPSPRGGAGNSAFGRGESSRTARLGGGGASLRRQPQPQAPSVRTICCNDREANAPVGYKGNSVSTTKYNVLTFLPKGLFEQFRRVANLYFLMISILSTTPISPVHPVTNVVPLSLVLLVSLIKEAFEDWKRFQNDMSINNAHVDVLQGQKWETTPWKRLQVGDIVRIKQDGYFPADLLFLSSTNPDGVCYIETANLDGETNLKIRKALEKTWDYKNPEKAFEFKGEIQCEQPNNSLYTFTGNLIVDKQTMPLSPNQVLLRNCGANTLKYSX

SEQ ID NO: 22649 - protein, 389 aa, Oryza sativa
  unsure (1)..(389): unsure at all Xaa locations
XHTPHPPSXVINHQWLXAVVKMAVVCXCSSCPPVXXLMASAADARPDTVDDAAANDAGMLQEADIGVGISGVEGMQAVMASDFAIAQFRFLERLLLIHGHWCYRRISVMICYFFYKNVTFGVTIFLYEAFASFSGAGARTGWFLSLYNVIFTSLPVIALGVFDQDVSQRLCLHYPGLYQEGVQNILFSWRRILGWMANGVINAILIFYFCTTAFGIQAFRQDGQVAGLDALGVLMYTCVVWVVNCQMALSVNYFTIIQHIFIWGSIAVWYLFLLAYGAVDPRFSKSAYMVFIEQVAPALSYWLVTLFAVMATLIPYFCYAAIQIRFFPMFHNKIQWKRHLGKAEDPEVARQXCRHDTGTSSHQRMVGISARRDGKAMQVTKETELQVQG

SEQ ID NO: 22650 - protein, 216 aa, Oryza sativa
  unsure (1)..(216): unsure at all Xaa locations
LYSFIGTMEWKDKQYNLSPQQLLLRDSKLRNTDYIYGAVIFAGHDTKVMQNATDPPSKRSKIEKRMDKIIYVLMSSLLVIALLGSVLFGIWTKEDLMNGEMKRWYLRPDDSTIFYDPKRAALASFFHLLTALMLYSYFIPISLYISIEMVKILQALFINQDIEMYHEESDKPTHARTSNXNEELGQVDTXVLSDKTGTLTCNMMSSIKCSIAGIGX

SEQ ID NO: 22651 - protein, 193 aa, Triticum aestivum
  unsure (1)..(193): unsure at all Xaa locations
XPKQKALVTRLVKTGTGKVTLAIGDGANDVGMIQEADIGVGISGAEGMQAVMASDVSIAQFRFLERLLLVHGHWCYSRISSMVCYFLYKNITFGVTLFLYESFSTFSGQTLYNDWSMSLYNVLFTSLPVIAMGVFDQDVSARFCLKYPMLYQEGPQNLLFRWSRLLGWMLHGVGSAVIIFFLTIASLKHQAFR

SEQ ID NO: 22652 - protein, 192 aa, Triticum aestivum
  unsure (1)..(192): unsure at all Xaa locations
QNXGPLMVKHLKVEYKTSSXLGXIANDKSVNIEESPNFDDAELALIIDGNSLVYILEKDLESELFDLATSCKVVICCRVAPLQKAGIVDLIKSRTSDMTLAIGDGANDVSMIQMADVGVGICGQEGRQAGMASDXXLGQFRFLKRMLLVHGHWNYQRMAXMILYNFYRKAGFVLMLFWYILHTAYSATLALX

SEQ ID NO: 22653 - protein, 247 aa, Triticum aestivum
  unsure (1)..(247): unsure at all Xaa locations
XXRSASERAGSQRDLRDEDARFVYINDAPRTNAPPAMFPDNSIHTSKYSVLTFIPRNLYEQFHRVAYIYFLVLAVLNFVPQLLVLSKEAGVLPLAFVLGVTAVKDAYEDWRRHRSDKNENNRTASVLADGVFRPKRWKDIQVGDVVRLVANETLPXDMVLVSTSDPTGVAYIQTINLDGESNLKTRYAKQETMXXTPPEALAGVIKCEKPNRNICGFLATVDLNGRRAISLGASNVMLRGCELKNTX

SEQ ID NO: 22654 - protein, 181 aa, Triticum aestivum
  unsure (1)..(181): unsure at all Xaa locations
LCLGWRDLKESEYKEWSKNFQEASCSLDNREFKMSEVCHSLERDLHILGVTAIEDRLQDGVPETIKLLRNAGINVWMLTGDKQNTAVQIGLLCNLITSEPNSQLLSISGKTEEDILRSLERALLIMKNTSETKDLALXLXDGWALEIILKHSKESFIDLAMLSKTAIXCCRMTPLQKAQSX

SEQ ID NO: 22655 - protein, 198 aa, Triticum aestivum
  unsure (1)..(198): unsure at all Xaa locations
XPASGLXTLVLAYRQLEEIEYAKFERKFTAAKNSVSADRDELIDEAADLIERDLILLGATAVEDKLQKGVPDCIDKLAKAGIKIWVLTGDKMETAINIGYACSLLRQGMKQITITLDTPDIIALEKGGDKGAINKASKVSVVQQISEGKKLINASXXNESFALIIDGKSLTYALKDDAQAAFLDLTIACGSVICCRSX

SEQ ID NO: 22656 - protein, 219 aa, Triticum aestivum
  unsure (1)..(219): unsure at all Xaa locations
XTRPDSSSGSRFQCRSLNINEDLGQIRYIFSDKTGTLTQNKMEFQQASIYGRNYGSSLPSDSSHEITIAESSSQHDRKPKSEINVDALLLALLKQPLFGEERLAAHDFFLTLAACNTVIPVSTGGSPDLTNEVSEVGAIDYQGESPDEQALVIAASAYGYKLVERTTGHIVIDVQGERIRLDVLGLHEFDSVRKRMSVVVRFPDDTVKVLVKGADTSMX

SEQ ID NO: 22657 - protein, 119 aa, Triticum aestivum
  unsure (1)..(119): unsure at all Xaa locations
XGRVGEIILTRYKEAFTELAVLSKTAICCRVTPSQKAQLVKLLKSCDYRTLAIGDGGNDVRMIQQAHIGVGISGREGLQAARAADYSIGKFRFLKRLILVHGRYSYNRTAFLSQYSFYK

SEQ ID NO: 22658 - protein, 318 aa, Triticum aestivum
  unsure (1)..(318): unsure at all Xaa locations
SNQLSKFNYYVDILFLMQICYFFYKNVTFGVTIFLYEAFASFSGKPAYNDWFLSLYNVFFTSLPVIALGVFDQDVSSRLCLQYPELYQEGVQNVLFSWRRILGWMFNGVVNAILIFFFCTTALKDQAFRQDGQAAGLDALGATMYTCVVWVVNCQMALSVNYFTGTRHIFIWGSITVWYIFLMVYGAIDPKYSKTAYMVFIEQLAPALSYWLVTLFVVTATLVPYFCYAAIQIRFFPMFHNKIQWKRYLGKAEDPEVARQLSSRHRTSSHQRMVGISARRDGKAMQVKKGTDVXRLKDDILSVDFVFCTDYRMSSPER

SEQ ID NO: 22659 - protein, 193 aa, Triticum aestivum
  unsure (1)..(193): unsure at all Xaa locations
XVRVITYFFYKNLTFTLTQFWFTFQTGFSGQRFYDDWFQSLYNVIFTALPVIMVGLFDKDVSASLSKKYPQLYQEGIRNTFXFKWKVIAVWGFFAFYQSIVFYYFTAAASQHGHGSSGKILGQWDVSTMAFTCVVVTVNLRLLMSCNSITRWHYFSVAGSIAAWFLFIFIYSAIMTSFDRQENVYFVIYVLMS

SEQ ID NO: 22660 - protein, 93 aa, Triticum aestivum
  unsure (1)..(93): unsure at all Xaa locations
XDEILNVLEFNSTRKRQSVVCRFPNGKLVLYCKGADNVIYERLADGNYDIKKTSREHLEQFGSAGLRTLCLAYRDLSMDQYKSWNEKFVQAKS

SEQ ID NO: 22661 - protein, 164 aa, Triticum aestivum
  unsure (1)..(164): unsure at all Xaa locations
XSGGHKEKQIEESPHVKGFNLKDPRIMDGNWIHEPNKDVIRDFFRLLAICHTCIPEVDETDKVSYEAESPDEAAFVIAARELGFEFYKRTQTSIFIRERDPSQNVADYQYRKYELLNVLEFSSSRRRMSVIVKEPEPEGRILLFSKGADSVMFTRLAPDGRKFE

SEQ ID NO: 22662 - protein, 126 aa, Triticum aestivum
  unsure (1)..(126): unsure at all Xaa locations
IPISLYVSIEVVKVAQAHFINQDIHMFDEETGNTAQARTSNLNEELGQVHTILSDKTGTLTCNQMDFLKCSIAGVSYGVRASEVERAAAKQMASGAADHDNPVEDVWESNEDEIQLVEGVTFSVGX

SEQ ID NO: 22663 - protein, 202 aa, Triticum aestivum
  unsure (1)..(202): unsure at all Xaa locations
SKSNPLLTEKPKIQRKDRANPARFGPRSRAWSTGRFREISRGFLQRLVWRRRGQDELADKGDGAGGHCTAGRRAFAAGGAFSARARXESSRTARLGGGGASLRRQPQPQAPTVRTIYCNDREANAPVAYKGNSVSTTKYSVLTFLPKGLFEQFRRVANLYFLMISILSTTPISPVHPVTNVVPLSLVLLVSLIKEAFEDWKX

SEQ ID NO: 22664 - protein, 765 aa, Zea mays
  unsure (1)..(765): unsure at all Xaa locations
PTRPNQDQNMYCAESDKPARARTSNLNEELGQVHTILSDKTGTLTCNSMEFLKCSIAGVAYGSRPTEVETCYGEIVETNGSFGRKDTTEFKRSVKGFNFTDSHLMNGRWAKECSRDAIEMFFRVLAVCHTAIPVADGNSAGMPYEAESPDEAALVTAAREFGFEFYHRTQTTISVHEYDPVVGGKVDRTYKLLNILEFSSARKRMSVIVRTEEGRLFLFCKGADSVIFERLSKDNGTAHLTKTKCHIDEYSEAGLRTLALAYCELTEEQYVVWNQDYSSAKNSVHTDHVAAVEKVSEDIEKDLVLLGATAVEDRLQNGVPECIYKLAQAGIKIWILTGDKLETAVNIGYACNLLRKEMEEIFITLENSSTSASEGSSGEGNKIATFEEIDRKLKDARGKISQKGTSTSFALIIDGNALTHALTGSLKNSFLDLAVNCASILCCRVSPKQKALVTRLVKIRTSKTTLAIGDGANDVGMLQEADIGVGISGAEGMQAVMASDFAIAQFRFLERLLLVHGHWCYRRIAAMICYFFFKNITFGFTLFWFEAHAMFSAQPAYNDWFISFYNVAFTSLPVIALGVFDKDVSSHVCLEVPSLHQDGVNNVFFSWSRILSWMLNGMCCSIIIYFGSLNAILVQAVRQDGRVAGFDILGVTMYTCVVWTVNCQLALYISYFTWIQHFVIWGSILIWYTFLVIYGLFSPAISTTAYHVFVEACAPSPLYWLSTLMIVVTALIPFFVYKISRTLYYPQYHDQVQRANXKELVVPVV

SEQ ID NO: 22665 - protein, 714 aa, Zea mays
  unsure (1)..(714): unsure at all Xaa locations
MMLLGTAYGKGVTEVERAMAMRKGDSLDDDIENGDYKDKKNHNSPNVKGFNFKDPRIMDGNWIHEPNKDMIRDFFRLLAICHTCIAEIDENEKVSYEAESPDEAAFVIAARELGFEFYKRSLATIIIREQDPSWNVVEKRYRKYELLNILEFSSSRRRMSVIVKEPEGRILLLSKGADSVMFKRLAPNGRKYEEETRRHINEYSDSGLRTLVLAYRVLDEKEYKEFNEKLNTAKASVSADRDVKIEQAADSIEQDLILLGATAVEDKLQQGVPECIDKLAQAGIKIWVLTGDKMETAINIGFACSLLRQDMTQIIVTLEQPDIIALEKDGDKYKIFKASKKKVMSQIEDGIKQIPPSTKTSFALIIDGKSIPYALEDDVKFKFLDLAINCASVICCRSSPKQKALVTRFVKQVTHKVTLAIGDGANDVGMLQEADIGVGISGAEGMQAVMASDVAVAQFRFLERLLLVHGHWCYRRISVMICYFFYKNVTFGVTLFLYEAFASFSGKPAYNDWFLSLYNVFFTSLPVIALGVFDQDVSARLCIQYPQLYQEGVQNILFSWCRILGWMLNGVMNAVLIFFFCITTFEDQVFRRDGQVAGLDALGVAXVHLYCMGCQLSNGALCELLHHNPAHIHMGQHCSMVPLPHSLWFHEPEVLNYSLHGLHRTAGPSPLILVGDTFCCAGNTCPLLHVCRDPDPVFPNVPQQDSVEAVLGEG

SEQ ID NO: 22666 - protein, 665 aa, Zea mays
  unsure (1)..(665): unsure at all Xaa locations
KKTSIEHLEQFGSAGXRTLWVAYRDLSXEQYESLNEKFVQAXSSLRDRDKKLVRCXXLIEKDLILIGCTAIQDKLQEGVPTCIETLSAVGIKIWVLTGDKMETAINIAYACSLVNNDTKQFIISSETDTNGXAEDRGDPVEIARGIKDSVKQNLKRFHEEARHSLISTPERKLALIIDGRCLMYALDPTLRVDLLGLSLSCHSVVCCRVSPLQKAQVTSLVRKGAQKITLSIGDGANDVSMIQAAHVGIGISGQEGMQAVMASDFAIAQFRFLTDLLLVHGRWSYLRLCKVITYFFYKNLTFTLTQFWFTFQTGFSGQRFYDDWFQSLYNVIFTALPVIIVGLFDKDVSASLSKKYPQXFTREGIRNSFFKWRVIAVWGFFAFYQSIVFFYFTAAASRHGQGSSGKILGLWDVSTMAFTCVVVTVNLRLLMACNSITRWHYISVAGSIVAWFMFIFIYSAIMTSFDRQENVYFVIYVLMSTFFFYLTIVLVPIIALFGDFLYLSIQRWLFPYDYQIIQEQHKDEPHEYSRVPLPETSHLSPEEARSYMISMLPRESSKHTGFAFDSPGYESFFASQQGIGVPHKPWDVARRASMKXRNEQENPSRANTSPLCKVLYIWFLDHRSFCIGSSTVALFSCLSPICCFGMKSRQRSVWLLNNHVGILGR

SEQ ID NO: 22667 - protein, 642 aa, Zea mays
  unsure (1)..(642): unsure at all Xaa locations
DPFANLHMVLVSKNGNNAEIHFNRRVMQYEILDILEXTSDRKRMSIVILDCQSGKFFLLSKGADEAMLPCAYSGQKTKTFVDAVDKYAQLGLRTLCLGWRELEPEEYTKWSQSFKEANSSLNDREWKVAEVCQKLEHSLEILGVSAIEDRLQDGVPETIEILRQSGINFWMLTGDKQSTAIQIALLCNLISSEPKGQLLHINGKTQDEVARSLERVLLTMRITSSEPKELAFVVDGWALEIILSRYTEAFTELAVLSKTALCCRVTPSQKAQLVKLLKSCDYRTLAIGDGGNDVRMIQQADIGVGISGREGLQAARAADYSIGKFRFLKRLILVHGRYSYNRTAFLSQYSFYKSLLICFIQILFSFLSGIAGTSLFNSVSLMAYNVFYTSIPVLTTVLDKDLSEKTVMQNPEILLYCQAGRLLNPSTFAGWFGRSLYHAIIIFLITIHAYANEKSEMEELSMVALSGSIWLQAFVVTLEMNSFTSVQLLAIWGNLIAFYALNFFISSIPTSGMYTIMFRLCRQPSYWITLVLISGVGMGPVLALKYFRYTYRPSVINILQKAERSRGPMYTLLNLESQLRSDSMMVXPVPQRQXKNKSSVYEPLLSDSPMASRRSLAPASSFDIFQPAXXSRTSHPRNIKAN

SEQ ID NO: 22668 - protein, 396 aa, Zea mays
  unsure (1)..(396): unsure at all Xaa locations
RCCRTELLNQPLIGEERLSAHDFFLTLAACNTVIPVNTDSHDLTNEVGGDRCXIDYQGESPDEQALVIAASAYGYTLVERTTGHIVIDVLGERLRLDVLGLHEFDSVRKRMSVIVRFPDNNVKVLVKGADTSMLNILKVEIDDELYDSLHVKIREATENHLSAYSSEGLRTLVIGSKNLTDAEFSEWQEMYEEASTSMHERSAKLRQAAGLVECNLTLLGATGIEDKLQDGVPEAIDSLRQAGIKVWVLTGDKQETAISIGLSCRLLTQTMHSIIINGSSEVECRRLLAEAKAKFXXIKSADFGSEYSENVTNFDGTELALIIDGSSLVYILEKPLESQLFDLATSCKVVICCRVAPLQKAGIVDLIKSRTSDMTLAIGDGANDVSMIQMADGGGX

SEQ ID NO: 22669 - protein, 376 aa, Zea mays
  unsure (1)..(376): unsure at all Xaa locations
XCHIDEYSEAGLRTLALAYCELTEEQYVVWNQDYSSAKNSVHTDHVAAVEKVSEDIEKDLVLLGATAVEDRLQNGVPECIYKLAQAGIKIWILTGDKLETAVNIGYACNLLRKEMEEIFITLENSSTSASEGSSGEGNKIATFEEIDRKLKDARGKISQKGTSTSFALIIDGNALTHALTGSLKNSFLDLAVNCASVLCCRVSPKQKALVTRLVKIRTSKTTLAIGDGANDVGMLQEADIGVGISGAEGMQAVMASDFAIAQFRFLERLLLVHGHWCYRRIAAMICYFFFKNITFGFTLFWFEAHAMFSAQPAYNDWFISFYNVAFTSLPVIALGVFDKDVSSHVCLEVCNLSDSYINHSFCSLSKKKKKKKKKKK

SEQ ID NO: 22670 - protein, 601 aa, Zea mays
  unsure (1)..(601): unsure at all Xaa locations
LDEEDAVAAVPHGRLAVXVTFAANLRSGSKAESTASSLESFRFQHGSASGTPAVFSRSQRDLRDEDARFVYINDADRTNAPPAGLPDNSIHTTKYSVVTFLPRNLYEQFHRVAYLYFLVLVALNMVPQLGVFTPAASVLPLAFVLGVTAVKDAYEDWRRHRSDRNENNRTASVLVGGVFVPKRWKEVQVGEVLRVVANETLPCDMVLLSTSDPTGVAYVQTINLDGESNLKTRYAKQETMXXTPPEALAGVIKCEKPNRNIYGFLATVDLDGRRAVSLGPSNIVLRGCELKNTTWAIGVAVYTGRDTKVMLNSSGAPSKRSRLETRMNRETIILAVVLFVLCAIVSVLAGVWLGDHSDELGVIPFFRKRDFSEDDPDATYKWYGMGAEVAFTFMKSVIIFQVMIPIALYISMEIVRVGQAFFMVQDRHMFDDKRQAKFQCRALNINEDLGQIKYVFSDKTGTLTENRMEFRCASVHGADFSDTAGAGADDGHSVIGEDGVALRPKTAVKTDPELVALLKDGGGGASADRARDFLLTLATCNTIVPIVXSTTTPPAGRLLEYQGESPDEQALVYAAAAYGYTLVERTSGHVTVDVLGSRQRY

SEQ ID NO: 22671 - protein, 699 aa, Zea mays
  unsure (1)..(699): unsure at all Xaa locations
LAAERTKSSAQQHATGTAIAAAAAVTRDGGRGGSTRNGRAHQVARPSGVAYTEALVCQLDEEDAVAAVPHGRLAVXVTFAANLRTGSKAESTASSLESFRIQHGSATGTPAVFSRSQRDLRDEDARFLYINDTDRTNAPTAGLPDNSIHTTKYSVDTFLPRNLYEQFHRVAYLYFLVLVALNMVPQLGVFTPAASVLPLAFVLGVTAVKDAYEDWRRHRSDRNENNRTASVLVGGVFVPKRWKEVQVGEVLRVVANETLPCDMVLLSTSDPTGVAYVQTINLDGESNLKTRYAKQETMXXTPPEALAGVIKCEKPNRNIYGFLATVDLDGRRAVSLGPSNIVLRGCELKNTTWAIGVAVYTGRDTKVMLNSSGAPSKRSRLETRMNRETIILAVVLFVLCAIVSVLAGVWLGDHSDELGVIPFFRKRDFSEDDPDATYKWYGMGAEVAFTFMKSVIIFQVMIPIALYISMEIVRVGQAFFMVQDRHMFDDKRQAKFQCRALNINEDLGQIKYVFSDKTGTLTENRMEFRCASVHGADFSDTAGAGADDGHSVIGEDGVALRPKTAVKTDPELVALLKDGGGGASADRARDFLLTLATCNTIVPIVXSTTTPPAGRLLEYQGESPDEQALVYAAAAYGYTLVERTSGHVTVDVLGSRQRPTKLRXGAHAWQCVRXPEACVGGAAVLDQDLFVLSNSIVRX

SEQ ID NO: 22672 - protein, 389 aa, Zea mays
  unsure (1)..(389): unsure at all Xaa locations
XRPGXTLALIVDGNSLVXILETDLQDELFKLATECSVVLCCRVAPLQKAGIVALIKNRTNDMTLAIGDGANDVSMIQMADVGIGISGQEGRQAVMASDFSMGQFRFLVPLLLVHGHWNYQRMAYMILYNFYKNAMFVLVLFWYVLYTAFTLTTAITEWSSLLYTVLYTSLPTIVVGILDKDLNKATLIAYPKLYGSGQRDDKYNVNLFVLNMLEALWQSLVVFYLPYFAYRRSTIDMSSLGDLWALAPVIVVNMQLAMDIIRWNWIIHAFVWGTIAATTVCLFVIDSIWVLPGYGAIFHIMGTGLFWFLLLIIVVTAMVPHFVFKAFTEHFRPSDIQIAREMEKFANVNQVNRLEFPTRGLXHDNSRETIVFRSFLIFTSFPPTGVNRS

SEQ ID NO: 22673 - protein, 351 aa, Zea mays
  unsure (1)..(351): unsure at all Xaa locations
XDLLQQQQQQMASSNSISTTKYNLFTFLPKSLFEQFRRVANIYFLLSAGIAYSPLAAYSSSSAIAPLVIVLVATMIKEAIEDWRRNQQDTEVNNRKTQVFQVNNIGGGGGFRDAKWKDIRVGDIVKVHKDEFFPADLVLLSSSYDDAICYVETMNLDGETNLKLKQSLEATSASLPPDDGDSFGAFRGAVVRCEDPNAHLYTFVGNIEMDGRQHPLSPQQLLLRDSKLRNTDFVYGVVVFTGQDTKVMQNSMKVPSKRSNVEKKMDRVMYLLLFSLIVISVVSSVFFGIATRDHGRTMRRWYLRPDDTEIYYDPKRPAVAAVLHFFTAIMLYGYFIPISLYISIEIVKLLQ

SEQ ID NO: 22674 - protein, 381 aa, Zea mays
VYSTLSIGDGANDVSMIQAAHVGIGISGQEGMQAVMASDFAIAQFRFLTDLLLVHGRWSYLRLCKVITYFFYKNLTFTLTQFWFTFQTGFSGQRFYDDWFQSLYNVIFTALPVIIVGLFDKDVSASLSKKYPQLYKEGIRNSFFKWRVIAVWGFFAFYQSIVFFYFTAAASRHGQGSSGKILGLWDVSTMAFTCVVVTVNLRLLMACNSITRWHYISVAGSIVAWFMFIFIYSAIMTSFDRQENVYFVIYVLMSTFFFYLTIVLVPIIALFGDFLYLSIQRWLFPYDYQIIQEQHKDEPHVYSRVQLPETSHLSPQEARSYMMSMLPRESSKHTGFAFDSPGYESFFASQQGVGVPHKPWDVARRAKHEAATSRKSLISAV

SEQ ID NO: 22675 - protein, 370 aa, Zea mays
  unsure (1)..(370): unsure at all Xaa locations
XFGTRQSCFSSTDNSLNLDVRLVNAVSSNDPDVIKFLLVMALCNTVVPIKSNDGTVSYKAQSQDEEALVNAAAKLNMMLISKDTITAEICFNGSKFWYELLDILEFTSDRKRMSVVVKEGETGKILLLSKGADEALLPRACPGQQIQRYLEAVEMYSQLGLRTLCLGWRDLKENEYKEWSKNFQKASCSLDNREFKIAEVCNSLEQDLQILGVTAIEDRLQDGVPETIKLLRNAGINVWMLTXGDKQNTAIQIGLLCNLITSGPNSQLLSISGKTEEDVLRSLERALFIMKNTSETKGLAFVLDGWALELILKHSKESFTRLAMLSKTAICCRMTPLQKAQSSSFLRDXXYLFMGDSYNRTAFISQYSFY

SEQ ID NO: 22676 - protein, 320 aa, Zea mays
  unsure (1)..(320): unsure at all Xaa locations
LQALFINHDIHMYHEETDTPAHARTSNLNEELGQVDTILTDKTGTLTCNSMEFIKCSIAGTAYGRGVTEVERAMARKKGSAAAADNTDKAKNKPAATKGFNFVDERVMGGNWVHQPRSDAIEMFFRLLAVCHTCIPEVDQESGKISYEAESPDEAAFVVAARELGFTFYKRTQTGVYLRELDPSSGKQVDRSYRILNVLEFNSARKRMSVIVKDEEGKLFLFTKGADNVMFERLSGSGSAHRDVTQQHINEYADAGLRTLVLAYRELKADEYAHFDRQFAAAKNSVSADRDEKIDEAADLVERDLLLLGATAVEDKLQVX

SEQ ID NO: 22677 - protein, 380 aa, Zea mays
  unsure (1)..(380): unsure at all Xaa locations
XRVEYERQVYALDPSQILLRDSKLRNTAFIYGVVIFTGHDSKVMQNSTESPSKRSRIEEKMDLIIYILFTVLVLISLISSIGFAVRIKLDLPRWWYLQPEKSNKLDDPSRPALSGIFHLITALILYGYLIPVSLYVSIELVKVLQAHFINQDIHMFDEDTGNTAQARTSNLNEELGQVHTILSDKTGTLTCNQMDFLKCSVAGVSYGVGSSEVERAAAKHMASGADDHDIPLQDIWEENNDDEIELVGVNFSVGTNIKPSIKGFSFVDDRLMQGNWTKEPNSSTILLFFRILALCHTAIPEINEATGSIAYEAESPDEGAFLVAAREFGFEFFKRTQSSVFVREKHTSSKDTVEREFKILNLLEFSSKRKRMTVILQACX

SEQ ID NO: 22678 - protein, 268 aa, Zea mays
  unsure (1)..(268): unsure at all Xaa locations
LQKPLKYITNYITTTKYNVVTFFPKAIFEQFRRVANLYFLLTAILSLTPVCPFSAVSMIAPLAFVVGLSMMKEGLEDWRRFMQDMKVNNRNVSVHKSDGEFDYRHWEDLCVGDVVRVEKDQFFPADLLLLSSSYEDGICYVETMNLDGETNLKVKRSLEVTLPLEEDESFKDFQAVIRCEDPNPSLYTFTGNFEYERQVYALDPSQILLRDSKLRNTAFVYGVVIFTGHDSKVMQNSTESPSKKSRIERKMDLIIYILVTVLVLISLX

SEQ ID NO: 22679 - protein, 635 aa, Zea mays
  unsure (1)..(635): unsure at all Xaa locations
XGLVSKNGNNAEIHFNRRVMQYEILDILEXTSDRKRMSIVILDCQSGKFFLLSKGADEAMLPCAYSGQKTKTFVDAVDKYAQLGLRTLCLGWRELEPEEYTKWSQSFKEANSSLNDREWKVAEVCQKLEHSLEILGVSAIEDRLQDGVPETIEILRQSGINFWMLTGDKQSTAIQIALLCNLISSEPKGQLLHINGKTQDEVARSLERVLLTMRITSSEPKELAFVVDGWALEIILSRYTEAFTELAVLSKTALCCRVTPSQKAQLVKLQKSCDYRTLAFDQQLTRNSMAYQNDKKKRCQSNXICCIFRFSRYCPKRYNEKSYLILYSCXQKWVVTIYXFSMGNKLISPIHQMQKNKLMSQSXAKKKKKTVSLMAYNVFYTSIPVLTTVLDKDLSEKTVMQNPEILLYCQAGRLLNPSTFAGWFGRSLYHAIIIFLITIHAYANEKSEMEELSMVALSGSIWLQAFVVTLEMNSFTSVQLLAIWGNLIAFYVLNFFISSIPTSGMYTIMFGLCRQPSYWITLVLISGVGMGPVLALKYFRYTYRPSVINILQKAERSRGPMYTLLNLESQLRSDKDSMMVAGSTAPAKNKSSVYEPLLSDSPMASRRSLAPASSFDIFQPAXXSRTSHPRNIKAN

SEQ ID NO: 22680 - protein, 261 aa, Zea mays
  unsure (1)..(261): unsure at all Xaa locations
XACLQKPLKYITNYITTTKYNIITFFPKAIFEQFRRVANLYFLLTAILSLTPVCPFSPVSMIAPLAFVVGLSMMKEGLEDWRRFIQDMKVNNRYVSTHKGDGEFDYRHWEDLCVGDVVRVEKDQFFPADLLLLSSSYEDGICYVETMNLDGETNLKVKRSLEVTLPLEEDESFKDFQAVIRCEDPNPSLYTFTGNFEYERQVYALDPSQILLRDSKLRNTAFIYGVVIFTGHDSKVMQNSTESPSKRSRIEKKMDLIIYIX

SEQ ID NO: 22681 - protein, 301 aa, Zea mays
MYHEETDTPAHARTSNLNEELGQVDTILTDKTGTLTCNSMEFIKCSIAGTAYGRGVTEVERAMARKKGSAAAADNTDKAKNKPAATKGFNFVDERVMGGNWVHQPRSDAIEMFFRLLAVCHTCIPEVDQESGKISYEAESPDEAAFVVAARELGFTFYKRTQTGVYLRELDPSSGKQVDRSYRILNVLEFNSARKRMSVIVKDEEGKLFLFTKGADNVMFERLSGSGSAHRDVTQQHINEYADAGLRTLVLAYRELKADEYAHFDRQFAAAKNSVSADRDEKIDEAADLVERDLLLLGATA

SEQ ID NO: 22682 - protein, 243 aa, Zea mays
  unsure (1)..(243): unsure at all Xaa locations
KKTSIEHLEQFGSAGXRTLWVAYRDLSXEQYESLNEKFVQAXSSLRDRDKKLVRCXXLIEKDLILIGCTAIQDKLQEGVPTCIETLSAAGIKIWVLTGDKMETAINIAYACSLVNNDTKQFIISSETDTIREAEDRGDPVEIARVIKDSVKQNLKRFHEEARHSLISTPERKLALIIDGRCLMYALDPTLRVDLLGLSLSCHSVICCRVSPLQKAQVTSLVRKGAEKITLSIGDGAHDVSMTX

SEQ ID NO: 22683 - protein, 391 aa, Zea mays
  unsure (1)..(391): unsure at all Xaa locations
XQRPKGIAQXFIYVLXLHEVKKXMKTYTFSGANDVSMIQMADVGIGISGQEGRQAVMASDFAMGQFRFLVPLLLVHGHWNYQRMAYMILYNFYRNATFVFVLFWYVLYTGFTLTTAITEWSSVLYSVIYTAVPTIVVAILDKDLSRRTLLKYPQLYGPGQRDENYNLRLFIFIMIDSVWQSLACFFIPYLAYRKSIIDGSSLGDLWTLSVVILVNIHLAMDVIRWNWITHAAIWGSIAATWICVMIIDSIPIMPGFWAIYKVMGTGLFWALLLAVTVVGMIPHFAAKAFSEYFIPSDIQIAREMEKSQDFHDVTHPEVQMSTVSRAXGRGLHSDLLFIRVGYSSTLSLVLFVVCTGNSFSSVQAFLMLAPLPTIQRIGPLYHSVYPPAKFC

SEQ ID NO: 22684 - protein, 220 aa, Zea mays
  unsure (1)..(220): unsure at all Xaa locations
XGRCGSDTRDSKGKLIDYQGESPDEQALAYAAASYGIVLVERTSGYIVIDVLGDRQRFDILGLHEFDSDRKRMSVIVGCPDKTVKLYVKGADSSVFGITNNSSELDIVRATEAHLHKYSSLGLRTLVVGMRKLSQSEFEEWQLAYENASTAVLGRGNLLRSVAANIEINVNILGATGIEDKLQDGVPEAIESIRQADIKVWILTGDKQETAISIGYSCKX

SEQ ID NO: 22685 - protein, 200 aa, Zea mays
  unsure (1)..(200): unsure at all Xaa locations
LSAYXSSEGLRTLVIGSKNLTDAEFSEWQEMYEEASTSMHERSAKLRQAAGLVECNLTLLGATGIEDKLQDGVPEAIDSLRQAGIKVWVLTGDKQETAISIGLSCRLLTQTMHSIIINGSSEVECRRLLAEAKAKFGINFDGTELALIIDGSSLVYILEKPLESEVFDIFFNCGIFLIYWSIKWQSLLHILQHIRNFCRX

SEQ ID NO: 22686 - protein, 330 aa, Zea mays
  unsure (1)..(330): unsure at all Xaa locations
XQAVMASDVSIAQFRFLERLLLVHGHWCYSRISSMICYFFYKNITFGVTLFLYDAYTSFSGQPVYNDWAMASFNVFFTSLPVVAMGVFDQDVSARFCLKFPMLYQEGPQDLLFQWRRIIGWMVNGVASAVIIFFLCTASLQHQAFRSGGEVADMATLGATAYTCIVWAVNLQMYITVSYFTLVQHVCIWLSVGLWYVFLPVYGAIAPSFSTTYYMVFVEALAGAPSYWVVTLLVSAASLVPYFTYTVVKSWFFPDYHNRIQWLRHRAETSADVELSQVLRQFSVRSTGVGVSARRDATAVLRRLNSTTQRADYSQSPPTPGVAVVVAADR

SEQ ID NO: 22687 - protein, 254 aa, Zea mays
  unsure (1)..(254): unsure at all Xaa locations
XQAVMASDVSIAQFRFLERLLLVHGHWCYSRISSMICYFFYKNITFGVTLFLYDAYTSFSGQPLYNDWAMASFNVFFTSLPVVAMGVFDQDVSARFCLKFPMLYQEGPQHLLFQWRRIIGWMVNGVASTVIIFFLCTASLQHQAFRSGGEVADMATLGATAYTCIVWAVNLQMYITVSYFTLVQHVCIWLSVGLWYVFLPVYGAIAPSFSTTYYMVFVEALAGAPSYWVVTLLVSAASLVPYFTYAVVKSVFFX

SEQ ID NO: 22688 - protein, 161 aa, Zea mays
  unsure (1)..(161): unsure at all Xaa locations
XHXLQDGVPEAIEKLREAGIKVWVLTGDKQETAISIGYSCKLLTRDMTQIVINSRSRESCRKSLEDAIAMVNKYQSFSTDPQLXXVPLALIIDGNSLVYIFDTDWEEKLFEIAIACDVVLCCRVAPLQKAGIVDLIKKRTSDMTLAIGDGTLXIFQLKMXD

SEQ ID NO: 22689 - protein, 151 aa, Zea mays
  unsure (1)..(151): unsure at all Xaa locations
CRYDVLGLHEFDSDRKRMSVIIGCPDKSVKLFVKGADSSMFGVIDKTANSDVVQATEKHLHSYSSLGLRTLVIGMRELSQEEFQEWQMAYEKASTALLGRGNQLRNVAANIERNLRLLGATGXIDDKLQDGVPESXXETEESGIKVWVLTX

SEQ ID NO: 22690 - protein, 332 aa, Zea mays
  unsure (1)..(332): unsure at all Xaa locations
XCSSRRQPPSWRSDVFFFLTHFYLAVVWWYSSIGFVVRIKLDFPHWWYLQSQESNKLDDPSXPALSRIFHLIMAPIPYRYLIPILYVSVELVKALQAHIINWDIHMFDEEIGNTTQVRTXNLNEELGQVHTILSDKTGTLTCNQMDFLKCSIAGVSYGVGSSEVELAAAKQMASGADDQXYPYTRXYGKRTMRIKSSWXKELPLVLATTXKPSIKGFSFEDDRLMQGNWTKEPNSSTILLFFRILALCHTAIPEINEATGSIAYEAESPDEGAFLVAAREFGFEFFKRTQSSVFVREKHTSSKVERLHIREFKILNLLEFNSKRKRMTVILQ

SEQ ID NO: 22691 - protein, 162 aa, Zea mays
  unsure (1)..(162): unsure at all Xaa locations
XARPSCRRRIIFDRLAKNGRMYEVDTTRHLNEYGEAGLRTLALSYRVLDESEYSSWNAEFLKAKTSIGPDRELQLERVSELIERELILVGATAVEDKLQKGVPQCIDRLAQAGLKIWVLTGDKMETAINIGYACSLLRQGMKQXCLSIPTGEQVAQDAKKLQ

SEQ ID NO: 22692 - protein, 165 aa, Zea mays
  unsure (1)..(165): unsure at all Xaa locations
LQDEDGQILLLCKGADRXXDLYHFLIFFGDALCSIIFDRLAKNGRMYEGDTTKHLNEYGEAGLRTLALSYRVLDESEYSSWNAEFLKAKTSIGPDRELQLERVSELIERELILVGATAVEDKLQKGVPQCIDRLAHAGLKIWVLTGVKMGTAINIGYACSLLRQX

SEQ ID NO: 22693 - protein, 174 aa, Zea mays
  unsure (1)..(174): unsure at all Xaa locations
FISLLPSSLFXQFRRVANLYFLMISIMSTTPISPVHPVTNVVPLSLVLLVSLIKEAFEDWKRFQNDMSINNAHVDVLQGQCWESTPWKRLQVGDIVRIKQDGYFPADLLFLSSTNPDGVCYIETANLDGETNLKIRKALEKTWDYVIPEKASEFKGLIVLIKAXNGFFIFTCGC

SEQ ID NO: 22694 - protein, 151 aa, Zea mays
  unsure (1)..(151): unsure at all Xaa locations
LPVCVVIVAXMAKEGVEDWRRKQQDHELNNRIVKVHRGSGHFEETKWKNIKVGDVIKLEKDNFFPADMILLSSSYPDGICYVETMNLDGETNLKIKQALEVTLDLQEDTKFREVRQTIKCEDPNANLYSFVGSMEWRGQQYPLLPCFILER

SEQ ID NO: 22695 - protein, 704 aa, Entamoeba dispar
MEKAWDFLQKKLFLRKKPEQPRTIIIPITKQNKKFCSNKVENNRYTYLNYIPKCLFNQFKYFYNLYFLITALSQFVPILQVGYRFTYTMPLAFVVILAMAKDAYDDIRIRIRDKQTNSQPFTQLIGGEPKEVQSKDIVVGNILKLKKDERVPADCLILRSTEESGSIFIRTDQLDGETDWKLRRAIGETQKMDIQTICNCQFELNVEAPHADVYSFQGTIKINEDPKLYSLNVENTAWANTIVASDEMCALVIYTGNDTRLARNRKQNGNVKRGKTEDEVNFLSKILFCSLMGLSILMIIPDLIQHPNWFILVSLTRFMILFSSIIPISMRVNLDIAKMVYAFFINKDKDIAGAEVRNSTLPEELGRVDFVLSDKTGTLTKNEMTFQVLCMQSETIRSTNFDDIKDDIRECLQNNGEKVLFKKKKNPKFIMRCVQAMALCHNVTPSFNENGEKYYQASSPDEVALVKFAESVGVVLEERTFKKIVLNMPMIGSIEYEILNVFPFSSSTKRMGIIVRNNKDNEIYLMKGADNVMAKIIKDNEWLSEECNNLAREGLRTLVFGSRKMSQEEYQEFNERYDHANTLMIGREEEVLKVQESIEHGLNAMCITGVEDELQEDVQKTLEMLKQANVRVWMLTGDKVETATCIAKSTKLVDIDQEIVQFFASSIDEATRLIFNNEGSIGTKALIVDGNTLSLMLKEMSKEF

SEQ ID NO: 22696 - protein, 1258 aa, Schizosaccharomyces pombe; identical to SEQ ID NO: 621

SEQ ID NO: 22697 - protein, 1305 aa, Ajellomyces capsulatus
MLPNQGHRCHTMRLLKADSQRRLRDRALELGQVTFLGQVKHTNRIHRLQIYTTTSDIQMTLNDFDDTRSAQGYYNDQNDMDGAIPVRDARARDRNSILSLGGGLVGRAKNMLGMKSPYSEMDLPLTETGARSAGVDTVGADDDGGSSSRLKEKKFSASDFKFGFGRRKIDPSTLGPRVILFNNSPANAANRYVDNHISTAKYNVFTFVPKFLFEQFSKYANLFFLFSAALQQIPNISPTNRYTTIAPLAVVLLVSAIKELVGDWKRKTSDKSLNYSRAQVLKGSTFEDTKWINVAVGDIVKVESEQPFPADLVLLASSEPEGLCYIETANLDGETNLKIKQAIPETADLVSPSQLGRLTGRIKSEQPNSSLYTYEATLTLQAGGGEKELALNPDQLLLRGATLRNTPWIHGLVVFTGHETKLMRNATATPIKRTAVERMVNLQILMLVGILLILSLISSIGHLVVRMKSADELIYLYIGNVNAAQQFFSDIFTYWVLYSNLVPISLFVTIEIVKYYHAFLINSDLDIYYDKTDTSATCRTSSLVEELGQIEYIFSDKTGTLTCNMMEFKQCSIGGLQYAEVVSEDRRVVDGDDSEMGMYDFNQLVEHLTSHPTRTAIHHFLCLLATCHTVIPERKAEKPDVIKYQAASPDEGALVEGAVMMGYRFTNRRPKSVIISANGQEQEFELLAVCEFNSTRKRMSTIFRCPDGKIRIYCKGADTVILERLHADNPTVDVTLQHLEEYASDGLRTLCLAMREVPEEEFSQWYQIYDKAATTATGNRAEELDKRLEIIEKDFFLLGATAIEDKLQDGVPDTIHTLQTAGIKVWVLTGDRQETAINIGMSCKLISEDMALLIVNEESALATKDNLSKKLQQVQSQAGSPDSETLALIIDGKSLTYALEKDMEKIFLDLAVMCKAVICCRVSPLQKALVVKLQRHLKALLLAIGDGANDVSMIQAAHVGVGISGVEGLQAARSADVAIAQFRFLRKLLLVHGAWSYQRISKVILYSFYKNIALYMTQFWYSFQNSFSGQVIYESWTLSFYNVFFTVMPPFAMGIFDQFISARLLDRYPQLYQLGQKGVFFKMHSFWSWIGNGFYHSLIAYFLSQAIFLWDLPLANGKLAGHWFWGTALYTAVLATVLGKAALVTNIWTKYTFIAIPGSMIIRMGFLPVYGFSAPRIGAGFSTEYEGIIPNLFQSLVFWLMAIVLPVVCLVRDFAWKYIKRMYFPQAYHHVQEIQKYNVQDYRPRMEQFQKAIRKVRQVQRNRKQRGYAFSQADEGGQMRVVNAYDTTRSRGRYGEMASSRPLDI

SEQ ID NO: 22698 - protein, 1360 aa, Neurospora crassa
MAAGRPPPGAPSSAQHDDLLLDFGNEQPYYGGGQRSTLNDDDLLRLHSDDAQGAAQPRPSVSYDDFVGSGQTTQPTATRPIQPAPGATGGGGPISPYPDSRSLDRHFSQTSDLGNYQRYAEDSDDYPDESTTSYYQHGGAIPPDSAAARDSARARNSVLSMGGGLIGRAKNMLGMGPEGYSEMDLPLTDPRATARVDHSHEPPPPQKPAKKFDFKFGFGGGKPDPATLGPRIIHLNNPPANSLNKYVDNHVSTAKYNFATFLPKFLFEQFSKFANIFFLFTAGLQQIPGLSPTNRYTTIGPLAVVLLVSAGKEMVEDYRRKQADKALNMSKARILRGSTFEETKWINVSVGDIIRVESEESFPADLVLLASSEPEGLCYIETANLDGETNLKIKQALPETSSMVSSSELSRLGGRIRSEQPNSSLYTYEATLTMQAGGGEKELPLNPEQLLLRGATLRNTPWVHGVVVFTGHETKLMRNATAAPIKRTKVERQLNTLVLFLVGILLIFSVVSTVGDLIQRKVEGEEGLAYLFLDPMNGASAVARIFIKDMVTYWVLFSALVPISLFVTIEMVKYWHGILINDDLDMYYDVNDTPANCRTSSLVEELGMVEFVFSDKTGTLTCNMMEYRQCSIAGIMYADKVPEDRIPSGEDGEDGIHDFKQLQKNLESHQSAQVIDQFLTLLAICHTVIPEQAEDGSIKYQAASPDEGALVDGAVQMGYRFVARKPRAVIIEANGQQLEYELLAVCEFNSTRKRMSTIYRCPDGKVRCYCKGADTVILERLNDQNPHVDATLRHLEEYASEGLRTLCLAMREIPEHEFQEWMKVYETAQTTIGGNRADELDKAAELIEHDFYLLGATAIEDRLQDGVPETIHTLQEAGIKVWVLTGDRQETAINIGMSCKLLSEDMMLLIVNEESAEATRDNLQKKLDAIRNQGDATIEMETLALVIDGKSLTYALEKDMEKLFLDLAIMCKAVICCRVSPLQKALVVKLVKKYQKESILLAIGDGANDVSMIQAAHIGVGISGMEGLQAARSADVSIAQFRYLRKLLLVHGAWSYHRVSKTILFSFYKNICLYLTQFWYTFQNVFSGEVIYESWTLSFYNVFFTVLPPLALGILDQFVSARLLDRYPQLYNLGQRNTFFKIRVFGEWIINAVYHSIILYVGGCLFWLNDGPQGDGFPGGKWVWGTAMYGAVLLTVLGKAALVTNNWTKYHVIAIPGSMAFWILFVAVYGEVAPKLNISVEYFGVIPRLFTSPIFWIQMPTLAILCLLRDFAWKFSKRLWRPEAYHHVQEIQKYNIQDYRPRMEQFQKAIRKVRQVQRMRKQRGYAFSQADESQTRVLQAYDTTQHRGRYGEMASSRPNQ

SEQ ID NO: 22699 - protein, 1156 aa, Leishmania donovani
MRQIRYRALHNGADEDARSRNSSTPNISTSSAHGPQLPQRHCCRPRDFVFDDSLSTGAAVSVLAIPQQKKHSVRRWLQEMLHLPIAPSLDNRQIPFGYFPGEWSPVGYPSNAVSNRRYTLSTFLPLALLRQFQNFFNLFYLFLAFSQVIPVLKVGFIFTYFSPLVMVVCLSLMKDALDEWKRFRRDRIANVEVFEKLTGGGDVVTVRSSHIRVGDLLILHQDQRVPADCVVLHTSEKSGTTFIRTDQLDGETDWKLRYPLNSTKGLGYAELGACASTCTVARLTKTSTASPAPSNWPTDRASRSRWRMPSGRRVWWRRGRWWLPSYTRVGRRAALNSTSPRNKLGLIERELNLIAVLCFALLLILSFLLVAQQQFRGDFAVMFVRFFILLSSMIPISMRVNVDVGRLWYSYDMSHDPNIPGAVARNANLPEELGRLRYLFSDKTGTLTKNKMKFRVMQVGPDTVLTDRFTDQLAGALQEYFGTGNWGAGARLMLSNVSARVSVRNSKQWSRDVQRVGDLIRAIVLCHNVSPVVMEEPLALGTDDETTALGRGAAAAVPATTDMRSQPTDYQASSPDEVALVKFCGSLGIVLTYRDLTTIAFTVGGGAQLHTCTIVKTFPFSSERKCMGIILRERTGSCSGGSSQETVKFYMKGADVKMASVVRQSEWLEECCQELAQMGLRTLVFASRTLSEEMLGAFLQQYEAAISILGEGRAAAIEAAMKLLETDMTLTGVTGVEDELQDDVVVCLETLGMCGIKVWMLTGDKVETAITIGRSTRLIPRHCRIEYLCGMAPADIGHRLHELQEEFCWGVTCGSIVPPWTLVLDGNALAYCLSHASFFADVARTAYSVIVARCSPTQKAAVVTVMRDSCRDARVAAIGDGGNDVSMIQAANVGIGIEGLEGKQASMAADFSITKFSHCLRLIMWHGRNSYQRTCRLSQFIMHRGIVYSVVQTVFSVLFAGTTMSVFNGYLLMGYSTVFTMAPAFALVLDEDFNESDVHEYPFLYKDLLKARSMNTRTFLQWVWASFFQGGVMMLMALQLFKSDMFQIVTIAYTSLLITELAIVGATAHLRILWRERRARFFLFLCSEVVSLLMFFLAVVVLPDTFDRDFFFSWSCWWRVAVICLASIAPLMIFQMVGKYILFNPRIAVSCMGCRT

SEQ ID NO: 22700 - protein, 387 aa, Trypanosoma cruzi
DKTGTLTENAMKFKMGDIKGHLIYNENHSFSLELLQRQGVIRTAAEEYFLALAICHTIQPFPDADAPLGVVYEGGSPDEVALVTTAAEHGFRLLERNSRCLTVEVEGERRVYDILATLEFTPERKMMSIIVQERNTERIILFTKGADSSVGSRTADEEDVQEYMQILSQSLLDMAEHGLRTLLIATRDLTSEMFSEWNTRFLAAGKVLVRRNEAVDRLCGEIEQELRLLGATAIEDKLQEEVPETVSFFREAGVMMWMLTGDKRETAVTIAATSSLLDPRRDYVVHVDLGSLDPKDPEAIEKIGADLHQVELHLESGRREGVRCTLVIDGTSLGVVMEHYFELFVRLSKCVSSAVCCRLTPLQKAEIVRMFQKSTGFTALAIGDGAN

SEQ ID NO: 22701 - protein, 393 aa, Trichomonas vaginalis
DKTGTLTRNITEFTKCSIAGRKYGHGTTEVPMRLQMPVGIPCEKPDPTGKVFKDDQFMQLLNGNTPMEIKHFLWILSVCHAVIPEPNEKKPYGIAFQASSPDEGALVSAAADFGYLFKARKPGSVTVRHNDVDVEVEVLAVLEFTSERKPSSVIIRHPETNEIVLYCKGADDLIMARLAKDSLYVDVTQQHLKDFAADGLRTLCAAYKVIDPQWFEGWAKRYNDACCKLEGREQAVDEVANEVECALQLLGATAVEDKLQIGVPEAIDSLLKAGIKVWVITGDKRETAINIGFACSLLSTDMKLTILDSNDSQEIINELNKGLQETGPVALVASGAALYHALLPENQPLFFQFASICQSVVCCRVSPLQKATVVSMVRKQTGALTLAIGDGAN

SEQ ID NO: 22702 - protein, 356 aa, Trichomonas vaginalis
DKTGTLTENKMNLVSFVDHSGVHSQYFSQFSAEDKEKSADMLLSFVLNNSVIVYNSPNGIEYNAESPDEAAGVKFASECNWVLKARNPARIAIEVNGVYQVYDIIAVFPFNSTRKRMTVVVRKQGEEGLLVLTKGADNIIYPTCREVYFRQELNDYAISGYRTLVFAMKELYGEEKQKFMENLNKITLSMDKVDEKLLEFAESVEQDLECIGIAAIVDKLQEGVPETIEWLRRAGIHVWVLTGDKLETAIEIGKTSKVIPHGSDVLIVGNSDKIVTSLDLGRYIDEFDNFNDPVLVITEEVLEFCLSNQSYLFFKLAMKCKSVIFSRVSPYMKAKIVNLVRTRNNAITLAIGDGAN

SEQ ID NO: 22703 - protein, 283 aa, Trichomonas vaginalis
DKTGTLTARVPDESMTIDLGGTETKFEHLATIEFDSDRKRMSVVVRAPNGEVVISRKVPIRSMFPLIAKDEDESVINLRKSSRSICRRRPQNPYYAWRLMPKDEFEQFMAEYREANLAMTDRDKKVKEVGAKIEKDLVLLGAVAIEDQLQPNVPETMSYLSMMGIKLWVLTGDKHETAVSIAKSTDVITPEWQKSSKFYRRPFRNSRQSQDKSMNVHLHAFFVLSPDALIYTTEQVPLELVKMGDQCRSVVCFRMSPFLKSKVVDVMRSNTKKVCLAIGDGAN

SEQ ID NO: 22704 - protein, 1057 aa, Entamoeba histolytica
MNKAWDFLQKKIPFLRKKPEQPRTIIIPITKQNKKFCSNKVENNRYTYLNYIPKCLFNQFKYFYNLYFLITALSQFVPILQVGYRFTYTMPLAFVVILAMAKDAYDDIRIRIRDKQTNSQPFTQLIGGEPKEIQSKDIVVGNILKLKKDERVPADCLILRSTEESGSIFIRTDQLDGETDWKLRRAIGETQKMDIQTICNSQFELNVEAPHADVYSFQGTIRINEDPKIYSLNVENTAWANTIVASDEMCALVIYTGNDTRLARNRKQSGNVKRGKTEDEVNFLSKILFCSLMGLSILMIMPDLIQHPNWFILVSLTRFMILFSSIIPISMRVNLDIAKMVYAFFINRDKDIAGAEVRNSTLPEELGRVDFVLSDKTGTLTKNEMTFQVLCMQSETIRSTNFDDIKDDIRECLQSNEEKVLFKKKKNPKFIMRCVQAMALCHNVTPSFNENGEKYYQASSPDEVALVKFAESVGVVLEERTFKKIVLNMPMIGNVEYEILNVFPFSSSTKRMGIIVRNNKDNEIYLLMKGADNVMSKIIKDNEWLSEECNNLAREGLRTLVFGSRKMSQEEYQAFNERYDHANTLMTGREEEVLKVQESIEHGLNAMCITGVEDELQEDVQKTLEMLKQANVRVWMLTGDKVETATCIAKSTKLVDIDQEIIQFFANSIDEATSLIFNNEGSIGTKALIVDGNTLSLMLKEMSKEFIQFALKAQAVVCCRCLPSQKADIVRLVKSSGLTTCAIGDGGNDVSMIQEADVGLGIEGKEGKQASMAADFSIKQFSHMLKLLLWHGRNSYIRTSDLALFIMHRGMIISIMQAVFSMVFYFTPITLFTGILLVGYSTFYTMAPVFSLVLDERISLKDIMQFPVLYAEMQKGQNLSFKTFSAWMFISILQGSVIMMLAMILFDSSFVHIVSISFTVLILIELLNIGFTIRRWNWIIFASEASSVLMYLISIIVLRPTFEPSFVFSLGFWWRVAVITLINSFPFILKFIYELLNPPKHMTVGHKKFPISFDLTCCCNCHNIRKKNDYQDINFSEIYDKTETNDDSTKALIDHLN

SEQ ID NO: 22705 - protein, 1553 aa, Plasmodium falciparum
MSLVYRKTLNFLKGKNEDDKDVKININGENKRTCNNSVITSKYTVFNFIFLNMYEQFHKISNVYFFFIGILQVIPQFTATNGIPTVFFPLLIVLTANAIKDAFEDWNRHKTDKIENNRMCYGIVSEEEKKIYQEKSNKKNIFKKLKRYFFGNRKICNTENYYDEDDMCDDEITDINDYINNYEDNLENIEGTVKKRWKDIKAGDIILCRRSEFFCADILLLCTSHKNGIAFVETSSLDGETNLKVKEANTFLFNILGNDRNSAIDNVKNLKGFILSDKPNKDLSTMYGTIYFEKDKKIDVENIGIQELLKKTTEEIEYRKKRLSSVDLSKSSSAIGSNLCNNNNKSDSKSDIKNYNKDDDDFDDMDENNILKNDNYIRIPFDEKQFVLRGCKLKNTDWIMGIVIYVGRETKIQMNSSKSIKKTSKLEILTNKMTIIIWVIQMIICLISAYYNAIIVSSSRKNRFRYLPFNLEKAKKPYIVGIISFFSWVVITGNFVPISLIVTMSFVKVVQAYFISCDKNMIHKVQADVPSFGEQKEIPNIPKDDISSDADVIKRMRTKKIADSSLLHIDENQTEEDNMDMKSDCIAFKNNSSHQNINGNNKQYSSSSLGIISNAPKREISSRVISFKDSKEKNYIYFNAVPRTSSLIEELGQIEYIFSDKTGTLTCNIMEFRKCAINGISYGKGLTEIKRNILKKKNLEIPVEPTMKFKKKTPHVNIIDNDIINHLKDPNHFNHVNLINFFLHLAINHAVICEKDKEGVTTYSSSSPDEEALVNAAKHFDITFLYRREGKYGISIFGKIYEIDTLATIEFTSKRKMSSVICRIPVINPDYNHPTDAKSSNMDKKKNNMDDHLVVGKNEEKEETDDLNVYPPKKEAHSKLNNNNNNNNNIRIDNLYDDKNNFNIIYNHNEGRTPEVITCKNSKNSKIMLFCKGAGSIILKKLAKRTDIDEITIEHMETYADEGLRTLCIAQRELSEESFAEWYHLYKEASLSIKDREEKLESVAEYIENDLILQGITGIEDKLQEGVSSTIEDLRMAGIHIWMLTGDKIETAMNIGIAANLIDNYSEQFIYTEEYIESEEALIKKIDDDILMVEKSLNIPHYNFDDENNNVEDEKRKTFFRNNFIKNFFCAKNKSGLLLNPDKYNMLINTLNYVLVVDGSVIDLLLSEKMERKFFYLADKCSSVICGRVSPYQKGAIVSSANRLLNKITLAIGDGANDRNMINTANIGIGIRGQEGVQAFNSSDYGISQFRFLKNLLLVHGRLSYRRISKLVVYMFYKNMVLIFPLFIFGSISLYSGQKIYFEFLLHLFNVLFTAIPVVIHAVLDQDISLNTAMEKPNLYKLGIHHYYFNIRTFISWVMNSLFHGSVVFLIPLYFLSYYNIPTSDGIPYDIWTVGCATYFLTVLIVNFKILFETYYLNILPISGIALSIFSFVLLVTAFSFMCVGSIHLLGTIVYLVQSLRFWLVVILGLFTALLRDYVFKVYKRNFNPEIYHLLLDQENAKIGMNDVIDQLKLNEFDKDDDIRIEKSKSLGYAFSEADPACIQLIRKQDNMI

SEQ ID NO: 22706 - protein, 1501 aa, Plasmodium falciparum
MYEQFHKISNVYFFFIGILQVIPQFTATNGIPTVFFPLLIVLTANAIKDAFEDWNRHKTDKIENNRMCYGIVSEEEKKIYQEKSNKKNIFKKLKRYFFGNRKICNTENYYDEDDMCDDEITDINDYINNYEDNLENIEGTVKKRWKDIKAGDIILCRRSEFFCADILLLCTSHKNGIAFVETSSLDGETNLKVKEANTFLFNILGNDRNSAIDNVKNLKGFILSDKPNKDLSTMYGTIYFEKDKKIDVENIGIQELLKKTTEEIEYRKKRLSSVDLSKSSSAIGSNLCNNNNKSDSKSDIKNYNKDDDDFDDMDENNILKNDNYIRIPFDEKQFVLRGCKLKNTDWIMGIVIYVGRETKIQMNSSKSIKKTSKLEILTNKMTIIIWVIQMIICLISAYYNAIIVSSSRKNRFRYLPFNLEKAKKPYIVGIISFFSWVVITGNFVPISLIVTMSFVKVVQAYFISCDKNMIHKVQADVPSFGEQKEIPNIPKDDISSDADVIKRMRTKKIADSSLLHIDENQTEEDNMDMKSDCIAFKNNSSHQNINGNNKQYSSSSLGIISNAPKREISSRVISFKDSKEKNYIYFNAVPRTSSLIEELGQIEYIFSDKTGTLTCNIMEFRKCAINGISYGKGLTEIKRNILKKKNLEIPVEPTMKFKKKTPHVNIIDNDIINHLKDPNHFNHVNLINFFLHLAINHAVICEKDKEGVTTYSSSSPDEEALVNAAKHFDITFLYRREGKYGISIFGKIYEIDTLATIEFTSKRKMSSVICRIPVINPDYNHPTDAKSSNMDKKKNNMDDHLVVGKNEEKEETDDLNVYPPKKEAHSKLNNNNNNNNNIRIDNLYDDKNNFNIIYNHNEGRTPEVITCKNSKNSKIMLFCKGAGSIILKKLAKRTDIDEITIEHMETYADEGLRTLCIAQRELSEESFAEWYHLYKEASLSIKDREEKLESVAEYIENDLILQGITGIEDKLQEGVSSTIEDLRMAGIHIWMLTGDKIETAMNIGIAANLIDNYSEQFIYTEEYIESEEALIKKIDDDILMVEKSLNIPHYNFDDENNNVEDEKRKTFFRNNFIKNFFCAKNKSGLLLNPDKYNMLINTLNYVLVVDGSVIDLLLSEKMERKFFYLADKCSSVICGRVSPYQKGAIVSSANRLLNKITLAIGDGANDRNMINTANIGIGIRGQEGVQAFNSSDYGISQFRFLKNLLLVHGRLSYRRISKLVVYMFYKNMVLIFPLFIFGSISLYSGQKIYFEFLLHLFNVLFTAIPVVIHAVLDQDISLNTAMEKPNLYKLGIHHYYFNIRTFISWVMNSLFHGSVVFLIPLYFLSYYNIPTSDGIPYDIWTVGCATYFLTVLIVNFKILFETYYLNILPISGIALSIFSFVLLVTAFSFMCVGSIHLLGTIVYLVQSLRFWLVVILGLFTALLRDYVFKVYKRNFNPEIYHLLLDQENAKIGMNDVIDQLKLNEFDKDDDIRIEKSKSLGYAFSEADPACIQLIRKQDNMI

SEQ ID NO: 22707 - protein, 4226 aa, Plasmodium falciparum
MSDSKKHYNESNVRYKVKYSGKIFGNNMKKLNENNNHDFTTAEAAWMEKKKKLYKDTNNQPLWDFRKIQINPTETDELISFPSNKICSKNYGKYSFIFKGLYEQFLRLPNIWFLLISLLEFIPQYQNLSNYMYYSKHSSFFLLLFFICVSIIKNIYEDSRRSNIDYQINNRLCHMLDGPNSQLKAVRWMELSVGSIIRLIENEQVHADILLLSCNNSEGVVYIETSLLNGETNLNKKYCVNETRNETSIYAISNIRGRIVCEKPNSNMESFNGSLKLDAHPRATSLSITNVIFKGSHSKNTEYIFGVILYTGNDTKIMKNISNNKHKLGYVNKELNSYTIIGLIFTFICVFISVLFKWTEDDKFRNGSHFFLITVKDNICESIVKYTLLYSNIIPISILISVDLISILQSILIENDNHISTFENYETSEPSTIDDMDNELGDFKMDKSHTFFKKYTYFLNNRSKNFTNNRYSSTNTERASDFRKSFFGTFDKLKTIKRYFYSIKSKIKSISQSNTLYNKSSAGGSIIRSDKNKQSTFSKSFIDIFQRTNNNEHSQTLDNNNTNDNNNNNNICKEKYQNVNNSKNVYVSEDSSNNKYKQNDYLQKSQEQNEIHSINNNNYNNKNDNNLQTEFSNHNFRINAYKTNRTTKDDTYNNKHISLNSRSKSNQKGILINSNEINRKKKKNLLQKIFPFFKKKRTNISEDLSKYVFRRSKQLNINHNNSEKYNLNDYDEYGWGLCLNSNMHGDLGNVDFIFTDKTGTLTNNNMTFNMCSIAGKTYGSKCKNKKKIYNNPKSNNDNKLNSYDKNIFKNKFSSEASIKKISNVRDFSNNVSSKNDLTLDDPTELISDEGNNYLRDKYEHTSDKKNDTNKNRDGANNSNNNNNKDVSNNKNKNNNNYNYNSNNDYIKQNGECNIYNNQNNTNNTHNNNIYYDEYNNTNEGNMKNTNVNKDTNSKCNKKDFIINTSDIINNNNNNNNDQKTNNLKYKSSSSWNSKAKKSSYINLNSYNKYQSFQNSSMLSSSLSSTCSSETEDENGSQLMYYSSSNYDNLDINNDMDSTKTYSHYTEQNYYNSVKDDKDINSEHQRYQQKKTNKQTKNIQQNQCDQWEDNRYTQESIKNQYFFDRNYQTFLMKQNFPRPKSFRLNMNSSSVKGRCDFNDTKIYNDLNSQSWRGYYIDEFFKCMTLCHAVTPFIQFDYIRNKHLTYTNSRSSKGISNNMDRYNINPTTTTTNNNNNNNNINNINNINNNNNNNNNNNNNKQFSCDYMKNRNDIIFETSTDYYANQDNAKRKREKTLFDNVSHCGEIQEYRDNKKYRMKRSQTCSNNRKIFSNQRTLYDYRNMNNNLKNKNSYLRNKLKSKIFLDKSYRKRKKSSGTYKGSDICKGIEKKETRRWKRFLHMKGSNNRNIFSRIKDFKSNSIIYNNQDKTNDYKNGYSNNINNNNSNNYTNEKINRSFNKRHSAVSFKQMSKEKLIPINNVLSNRCDVESYPNEELSFSKKKKKNSEIVSFASGKSDIGFEERTDAGIAGKNMELSYNELEKYKYVKHIDSNNKYINNNNNSIHMSHMSSNNNTFESHIYFDAIKYQSSSLDEECLIYSSSFLGYRLVLRNKNTMCIEIDGSFNKWTIIGVNEFTNRRGKMSIVVKPDSMESGSILYVKGSDSSILSLLNLKYSKFLDKKYSRKRRNKNIQKYKQKREEYNELKSKDINIEEFQKSKSLSLKNFKNNTPKVLFGECTLDNNNNNINKNYKYDKNDKHNNNNNNNNNNSNYSYNYLHDSNNLDAMQNQKYSYAYEDKEDYYYTNNGECNKYKERYRRLEKQLRKFSVKGLRSMIFAFRYLSEEETIKYKRMYDDACSSIYNKEQRLEKVAEEFERDLIYLGITGVKNGLQEKVPKTIDILNQSGIRIWMLTGDNVEYSLHVSFLCKFLNKHTKIFHAALENSNAKKLKREGMALYELFQLEKEEKKPYENLCLLVNGRNLQTFLNYTDLQTHFLNMACTCDVVIACRITAKQKAFLVQLIKNRLYPTPNTLAIGDGANDIAMIQEANIGVSIMTSDCIISAGYSDYCIKKFCYLRKLLFIYGSKHLYTISIILYWNFFKNILLILPIFFYQAYASWSCVKIYPELLYTFFSIFWVFIPIIYYMFLQHNLNYDILYNIPLFYALSRRRYNMNCFKFLPWIFEAIFYSMIIYFFAYAALKENSHLNNGEVITINTFGNICFIGCLLISILRLFLEGSLWSPSILITCFGCFLFVFFPSLLFICFAYLSNEYLREVFRQTFLWAPLYVLLILWFSTCIISYIFINFTKSILFPNIYNVVNHWLFEQYQEKHNKNKYIFSLSGKNKFLKLRKLGKKIKFKFKRNYSKKYDTNVIREHPLLHHTFKSEQDQNKCNEQFSKDPFISNSLLKSKNCKFKKDSSYSKSNIHVDEEQTYKGLKVVLSEQVVHAKENLVSFKNEKKNKNNKNTSMNVNDNIIIKNNNINIKNNDNNNDDNDNDNNNNNNNNDNYNNNDHNKKEFKQKHIQNNYENLFNHTQVENNLIKENLSIRNDNNRRDNKNETDYIKQSDEDYEMNPSITSLRKRECINDSKYIDNKSYDNKISNNHEEKDGFKSDDRSLINSNMMDYKNEFTENDTTYSFNDSHMFYDFPSNSKTTKDYKVINSRIDDSIMADMKNCLNPLKNTFLVDLLPPGKRFRINEDHIYFKNNERMENIPEALDVNKKYYHIIQNKAEYYDNDSLSEFSYTSSNSSINNKKKNENTQKEIVKVSHLINRFTLAFKDMQLESGFQIHKKNKFYKTFTPWYRFIFLLLGVFFLYVWKLESSLSQLWNMPSDASTDVFILFLSLLLELVLLAATVTTFFSNIFIENFNKIISAVVILIITYHVVSYSVTHIDGVFQAVLFPLYTFVILRLPFVNAVLCNIIFLGLFIIRFNGDHFLDKKGLAHYIPLFIGVDVFVGFVGYRLEYNQRKNFLLEYSVESSRRKQREILNTMLPPFVVDEMIYSELNEEGIPISLKAEDISTVTTIFCDIYDFQNIVASIEPTRLVEVLDRLFLCFDKCTEQFNCTKIETVFETYLAACGLVKREKDEDELENNKYSNNNKNNNNNYYYNRKKKKKKNNNNNNNNNNNNNNNNNNNNNLNNNNNNNNVNTSDDDGDFFEEDDANNHQIYNQMKGQEDAHDSIDFALSILHVSSHIKYEKSKMMLKKNDSFEDANDDTHNVNDSFNNDKAENDNTNTDNNKPTRIRVKVGIHSGRIIAGVVGSKKPQYALFGDTVNTASRMKTTGKPDYIHISEATYNLVKDDKTLIYEKKETEIKGKGIMTTYLLTSVIGLNYPFLGEHVEKKGHFISELYEDDLSNNLNYDKTQNILGYYSNKINQNNDSNINEGIINNNMNTFNTIDGDTSNYYVNLKDLSLNDLPNEYIKDVNTHYCEIIKLRNLKIGTAVGYQLKQKDFYNMTFLNNGLNNDTATNFNQYIESHKDFDDIKDLRIGMNKLSISDSLYYLNENVIRNEPINEYKNKIKINSVNTNKKSYEDAHLNAGNIIYTNNEYPNGQNIEEDDDLLLTNHYNKTNVNNNNNNNIYDVSKELIEHNKEDYKNILMCPKRCKNCNETYCTPNDCNNNDHVYHVMYHRKLSNIKKNYLKNIRKDANIKKDIEKEELNKIHSNKKSFNFFYLFSYIFKIFPFIGKINKEEKKNKSYKKGEQDKSSKRIIALNSEWIFLKFSDKNLEAKYRAHFYSNKSNINSIEQALIIFLVTFVMQTLISSTVYIVFIDHKRATQTLHINYFAYWSVRSVYTFFGFVLWLLFHYRTRPEVSSLLNIKWMIFFLNLLFISAACVFSIAYLWAISETDQTTSYTIWMTNDTIEFFFYLVILHHNTGMLFQTCILVDLLFITMSLTFIATSVVKTITTDSTVLLIPWYVAFNLISTYCKESIDRRTFYANESAKKTENRATELLNDMLPKHVLEEFQQDKLKLAYTHDRLTFLFADICGFTSWANGVDASEVLTLLQKLFAKFDNDSTKYGLYKLCTIGDAYVAISEPVTEDNKDYDPVDGTERVLEMAYSMIRIIKEIREKLYIPNLNMRIGLHYGSCVGGVIGSGRLRYDLWGIDVLTGNLMESNGIPGKINVSETLKNFLLQQFKNRFIFKPHTTIRVIYKDVKCFIITDKKEVESSNHSKLLQNKNYLLNKKFSTQNYLVKNIFAKKKHSSISSSKNIHSYDEKKKKKNDLFYINVNDRQSNL

SEQ ID NO: 22708 - protein, 509 aa, Plasmodium falciparum
NSSKSIKKTSKLEILTNKMTIIIWVIQMIICLISAYYNAIIVSSSRKNRFRYLPFNLEKAKKPYIVGIISFFSWVVITGNFVPISLIVTMSFVKVVQAYFISCDKNMIHKVQADVPSFGEQKEIPNIPKDDISSDADVIKRMRTKKIADSSLLHIDENQTEEDNMDMKSDCIAFKNNSSHQNINGNNKQYSSSSLGIISNAPKREISSRVISFKDSKEKNYIYFNAVPRTSSLIEELGQIEYIFSDKTGTLTCNIMEFRKCAINGISYGKGLTEIKRNILKKKNLEIPVEPTMKFKKKTPHVNIIDNDIINHLKDPNHFNHVNLINFFLHLAINHAVICEKDKEGVTTYSSSSPDEEALVNAAKHFDITFLYRREGKYGISIFGKIYEIDTLATIEFTSKRKMSSVICRIPVINPDYNHPTDAKSSNMDKKKNNMDDHLVVGKNEEKEETDDLNVYPPKKEAHSKLNNNNNNNIRIDNLYDDKNNFNIIYNHNEGRTPEVITCKNSKNS

SEQ ID NO: 22709 - protein, 3124 aa, Plasmodium falciparum
MKTQTLSLMNINGKRKFLGTNNKIYRKVIINPTSEDDIQKFCRNYFRIYNFSLYNFIRRLISFDAILVYSLFLTVYIFSEINHGETKKYLFIDTAISLFFNIILLIVIESLFELKKLKDVKNANSQYYLRIVPKMSYFEKVMTKDIKVGNIIRIFQGDEFPADVVILYVKNNANAIVDSFKIDGLFRKSIKYAVDKYKIDKDYLKMLSEINGVIRCELPNKNIFCFQGNFKLDKHPRSLLLNYENFALQSSVLKGAEYIDAVVVYTGADTKKNLNIPQKIEENKTFCIKMNNIVYYLIFMYFVFVVLSIVIKTIFFHKKNSFQNSRDSFLSMLEDFVGLYILVLPIMMYSEKSLIYIIQSLRIENDLRMRNTDSEKPKVFNKNKNDSLGNVDLLATSRNGVLVKRKELLVSCVINNVMYGKKDIICSRTNFKLPTLNILDSERKNVSNLLNLDERIFKDPENIFFPTRDFYSFLKLFENKISSIYNPYSSSLSNLLKEKYKNYVNEEILNKNVKLTSFVKSQLTIGYNQICEDDELSYNCYEIKEDSQKENIQSVKIEDFILGLCGCNRIIIYNEKSLDISMNEYKSDNFMETYSKFETENEEYHENDHDEYHNMEHSDDENINSIEYEDICLYNIIRNTGFSIYCYKNTLFLYNLMKECKVYFLTCYHDFLRSNKFSMCILKCGYSINNEKEGGILYVRGYDFNILPYISKEKNNIKKIKNVIKIYTLNYLKVIILCKKQISNEDIAKYIILKSISKKLSFKFYDLIKLFFLYDLEVIGIIGLKNQLREGVKETFNDVINFDIKSWIFANECSKDTYLTALQCNLIVSSSNLFLINYYNLKNTHEEGANILFHNFISSLYKLKSNSYAVVINDESIKNIMTNVESMKIFLCIAMRATVVLFCKLQNETKGKIIRTLYALTSPKLTVLGIGTTLNDAYLLKYSSISVFLSLNEHVNILYNISDYVLQEFKFISELLILGRLNRFSLCKVFLWIIYLKITVVSFYFFHNFDNYFSGSSASSILYTQTTFALLHYFLIIAFSAYEIDLPYKFVRRLPYIYQLSRRKYFLNNNIILLTIIEAILISLTSYYILRLNVFHLITHREFTFHIFILNVFITTEKILLLSKTWHIYFFIMAVLIIGILLIYVNIFTLVDCIKNGKCEFSLFQMENIYFWTSLFPILYINFIFDKLMKYIKNRIYPDISDYLRKYFLRRICCHNNDKFLSQRKIKGINKFVNFEKNDILLKYIPTPKIYKIKDDPTYYNKSKRSKFLYDTFRKVIDINVKYRNQQLNLEYKTYEKGNKLKLRIIVILLFLIYIIIFSSQTIIDINTKSNIHYITMFYIIYFVLACVLLIYIRIRNKATSTFFFFLSRFLLICGFCIELYDNISNDILNVLITYSFTVSYIFFMSFKILEALLVCISILLLTFGVYYEKNKNMIDICTHFCSNPYLSINNLDHMNISCLCKKQIVIFLISLLSFTLICLSMKYYEIFYLKKKFLFRYKQKVNLAKQIEILHTMLPNFLVEYLLISDPKNDGIMVGKNISGEDRGIISVIFCDIDDFQNMVSTLQPHVLVETLDNLYLYFDKCIKYFNCIKIETVFESYLAASGLSEKKNNALDKIMYDTKCAIKLAIAQLSAKYYISYKVLDTREHFSDNSTSYDKYINKNISLKIGIHTGKAISGVIGSVKPQYALFGDTVNTASRMKSTSLPDHIHVSYDTYKYLKEDNTFIWKERKVFIKGKGKMKTYLLVDILDDVKRKGESLNYYSSSNLLLSQLGSEAVSIYEEREDIKEGSMDIIKESSRDIIKEDSRDIIKEISTNISKSSSRNISKSSSRSISDIKEGQIIDKEDLIFKINRMKNKIDSRYSKRIDKESRDKISDKTNHVLDEVVKHSDIHLLNYEINNKRCKKMKGDTNNENKLIGDIFNMYDKKIKYIYKKNYKSKSMENISFIKHYRNTKYKKSDYLLLDNKGESKKFKRNTSYVLESPLHLIGDIVDNNIKRKKKKKEIKTIVSDDMFTSPVNIKEYNYNEQERKKEIVGNLSYDKTKKICPFIKFTKEGRIKKNKIEKKEKKEYNNNFLYNDDYSSYSSPKYGDNENNFVIKYIRERKDFQKKFDHPNFNFSKFLHNYNPMKNKNKNKKNNVNVRRNEYPNYTSSSKDGVSYNFLSDSLFSSDNEYSSDNEYSSDSEKYYKKRVKKNKKIIKFDDLFTKIYIEKKRLLQMNNYDVKGKGKKLKNKGMERNKTKYKNVNEITKMKYFVNNENRDHEVNKEDISKSMQKYFLHISKHKKEQIEDKKKTHKYFHKNVECVYPYAGNNINHNFSRNEKRKYSINLYDHLDEQEKIKGKKKYFNKDKELIGSINKQTERKPKKKNKKNIENKKDKKKIRMITNKTKEKHSNSIISVEEQNMNHNNSLKKKEVNFTGKNEEYLNRANTNCSLGIKEMEEDVYEFHSNNIYYNNQTSYSDDINNTTKLKGMGNNTNDISKNKGKNKLGKKISFFSMNNKYHESEIMNEEDNKNMLNLTQSQIINKDKYNYFTHCPSLKKKKSVFTKINNLFKNYFKSIDVHEKFGFSKKFKFHSKDSDDIKGNNNKISKNRYNNNNNNNNSNYSNIDSGKYSHNNKKNHHHNNNKYHHHNNNKYHHHNNNKYHHQNNNYEKHHHSNNSRVMLSKGEKTEKNENVDYAYQFDNYDKKLLKKLTSNLQLNKKNVKNFNMFYYKFNDEELEEEYTRNYYREIINIDLTKKLIIIFIFTEIFLSLCNIIELSFYEKKLRYNDSIVIIWLIRSIYLFIITYIWIILKTKLKEYKNNSSKMMWTIFILNIFLCSWGIILIDLSCIHYSMLLGNKNERALFFMKDASELIICIQLIFIKNMLFKHKFFFFVFFYIFLIYSFSKLFSIHTCQTHICCSIILFISINILYFWYSEYLDRIQFLVKRKRNRMEKISQDFLTKILPRQVLEEYQNDNLQLTYKHEKIAFLFADIVGFTKWSKTVSPKEVLKLLQKLISKIDKDTIKLGLYKLFTIGDAYVATSQPNSSITDESEALEGILNILKLAKLILHNINTIKIQFNKHDFNMRIGLHYGSCVGGIIGSVRIRYDMWGLDVLIANKIESNGIPGEIICSEQFRHFFIQNEPQA

SEQ ID NO: 22710 - protein, 990 aa, Encephalitozoon cuniculi
MNRKENKIVTSKYTAMTFLPLNIYHQLSRPSNLFFLLTLILLSIPSISPFSPFTYLLAFVVVVGASMMKDGVEDYRRHKQDKVINEKPANVVRGKGRDAYAEEIHVEDLSAGDLIFIMKDQEVPGDVVLLNSKVETRDGIRCKNYCFVETSNLDGEMNLKKKTSQHQVECKRKDTGLEFRGEKLSLCSCDRYYMDRTSDFTVEDTGDLFNKFECQINIDGENILCNEKNVLLRGSRIKNTECVLGMVVCVGKQTKLGKSHFKAKVKISLFEKSVGDFIFGIFMIYLGILAATSVLGARFLRKDDIEYLYLNEYLANDALKQTGTNYILFSYLIPLSLFVTLEVSRMFHSMFISYDDEMARDGIRSICRNSNITEDVGMIEYILTDKTGTLTKNSMVFKYCHIYDSPDLISREELKESCFDIDLVNDLSPAVKKRRSRMMFILALLCCNSIEPLNNSLEGISQDELCIVQELERLGHVLVERDEKFVVLEINGRRVKLDIMVSLDFTSARQRMSVVMKVLGRYILFCKGSDQKLLGDKKMTFEQGDMGMIRALINNNSEYRSLVVGYKELSSDVLAWIENQYNRVSLKNKFLEQERIFDSVEEGMVYLGATFIEDELQDDVRGTITSLRDAGIKIWMITGDKKETAMSCSEDCGITQKSREPQSLVIDGKEFLEKLGDPEIFEYKSIVIYRATPYHKGKIAEKIVESGKNTLSIGDGNNDVPMLTSSHVGVGIMGKEGTQASLSADFAIPEFRLLKRLILVHGRYNLIRFSKITLNAFFKNIFFISIQFMYNFFNGYSGKPIYSNFFLNYYNVLFTSFVPLSIGLFDKDKPEIYLMSHPGDYRDARRLFSRPSFVFGFVYTVLLGIVVFGLSVGVVYVKDLISRRGLVGGYVLLTNYFSIIVFWVVLFTQIREISFFVVYSWIAIGLSIALNFITLFFIQELDVTTNNAALNLFSLPVFHLTSLFVLSGALLVDFVVTRMFSVVKKSRGWP

SEQ ID NO: 22711 - protein, 1094 aa, Encephalitozoon cuniculi
MTDLMGRFRHISKERRRRYPPNIIRNQKYKWYTFIFAVLRLQFSHFFNTFLFLVCMTQLKKEYLVSSLVASVGPWAMVLLFSLFKEGVEDYKRYERDKITNSQLYTKLTSQGFVRVPSSRIEVGDLVLLEKNERVPADMALLKTSDVSGHVFVRTDQLDGETDWKLKLTIPRMQSATFDELRKLSILAEQPSKDIYSFTGKIKIGKFSLDELSEIEEEGNEDEGIGRRIERLLEFDFGREEGSVGASEGPKDVSWVYSSSSQSTGESGSLDEDLGFVSDGRDSAAAGSSEGLEVGNESNVGRETEEADVSLKDEEKPVAEALGCENMLWMNTVVATCSILGCVVYTGKDAKAMLNTSRPRNKIGKIELELNGYMKVLGAGCMVLAGIFTYMRGVGSRPDIIFIRFLVLFSSVIPISLRITVDWARYCYGKYISEDERIEGAMMRSNNLPEELGRVSYFLTDKTGTLTKNEMEMKKIHLGTICYTKELNREISKNLAKVLNGRNDGKGVFFRGKKDINARVYDLVQALSVCHNVTPVISENEVSYQASSPDEVAIVQWTECVGMKLYKRDRSMIVIRDPLNDEQEYQILYTFPFTSETKRMGIIVRYNEEVIFFLKGADVVMRGIVKVNDWVEEEADNMARDGLRTLVIAKKVLSGKEFELFEEMYNKAWMSLVDRAEAMSKAMEIIEKDMNVLGLTGVEDKLQDDVKVTLENLRNAEMKIWMLTGDKIETAISIARSSRIFHRGTVYLVISDASSVGDVKAKLDLLRGSGYNSLVIDGQSLSFVIESCMDEFIEVASELEAVIGCRYTPTQKAAVARELKNKTRKCVCCIGDGGNDVSMITEANVGIGIVGKEGNQASLAADFSINKFCHVSDLLFWHGRNSYQRTAKVAHLIIHRGLTLTVIQAIFCSLIYFVPVGLFRGELLMLFITVYTFLPIFSIICSSDISRSVVVKFPELYKELTENKLLSYRHFSVWTLIAFYQGTIMMITFYLLKQEFFIISTLTFTSLVLNELLMVILTTTRMTPMVFISSGMSLAIYIVYFALRRGLLRYQRPFYLFLLKITVVNTLAILVSVFQKLWTKYMSPPTYSKLEVLV

SEQ ID NO: 22712 - protein, 1139 aa, Caenorhabditis elegans
MPTEARDNNRHIHLGKVRDPHHQHAQRFCSNRISTCKYNGFSFLPRFLYEQFRRYNNIFFLAIALLQQIPDVSPTGRYTTAVPFLIILSVSALKEIFEDVKRRRSDNKVNAFSVEILVDGHWIEKQWKDVSVGDFIRIDNDSLFPADLLLLASSEQQGMAYIETSNLDGETNLKIKQALDITSTMTSPEKLSQFESEITCEPPSRHVNEFNGNIEINGVARHFGIDQLLLRGARLKNTAWIFGAVIYTGHDSKLLMNSKRAPLKSGTIDVQTNYRIIFLFFVLVALALISATGSEIWRGNNIPQAWYLSFLEHDPKGSFLWGVLTFFILYNNLIPISLQVTLEVVRFFQAIYINNDIEMYDVNSDSCAIARTSNLNEELGQVKFIMSDKTGTLTRNVMKFKRLSIGSRNYGNNEDDEFADASLIEDYRQGDEHSTSILEVLKMMAVCHTVVPENKDGQLIYQSSSPDEAALVRGAASQSVSFHTRQPQKVICNVFGEDETIEILDVIDFTSDRKRMSVIVRDGAGGDIKLYTKGADTVIFERLEHGKEQEEAVEYCTEHLEDYASFGYRTLCFSMRHLTEQEYSQWAPEYKKAILAIDNRAKLLADAAEKLERNMILVGATAIEDKLQEWVPETIQALMAADIRVWMLTGDKRETAINIAHSCALCHTNTELLIVDKTTYEETYQKLEQFVARAIELEKQEKGFAMVIDGKSLLHALTGEARKHFGDLALRCHAVVCCRMSPMQKAEVVEMVRKLAKHVVLAIGDGANDVAMIQAANVGVGISGEEGLQAASASDYAIPRFHFLRRLLLVHGAWNHDRSVKVILYSFYKNICLYIIELWFAMFSAWSGQTIFERWTIGMFNVIFTAWPPVVLGLFDHPVPAEQIMKYPALYASFQNRAFSIGNFSLWIGLAIVHSLSLFFLTYATMEHQVVWDNGLTGGWLMLGNCAYTFVVATVCFKALLECDSWTWPVVVACIGSIGLWIVFVIVYSLVFPHIGGIGADMAGMAAIMMSSYTFWLALLFIPLATLLWDLVIKSLFTIAMPTPRELAVMYNKRTTSFNGFERLASYSSNVLENMRLLTSSLRGSTTGSTRSRTASEASLALAEQTRYGFAFSQDESSAVAQTELIRNVDSTREKPTGR

SEQ ID NO: 22713 - protein, 1222 aa, Caenorhabditis elegans
MFSWLPCCSSTSNEKNAPTERRLRANDREYNAQFKYADNVIKTSKYNIITFIPQNLFEQFQRIANFYFLVLMILQFIPQISSISWYSTAVPLVIVLAFSAIKDGYDDAQRHISDRNVNGRKSYVVRNGSLCEEDWSNVKVGDVIRMMSNQFVANTRWCYGVVVFAGKDTKLMMNSGKTKFKRTSLDRFLNILIVGIVLFLIAMCLICTILCAVWEYQTGRYFTIYLPWDDVVPSPEQRGGRQIALIAFLQFFSYIILLNTVVPISLYVSVEIIRFIHSLWINYDTQMYYENGEKSVPAKAHTTTLNEELGQVQYVFSDKTGTLTRNIMTFNKCTINGISYGDIYDHKGEVIETNDKTKSLDFSWNSASEPTFKFFDKNLVDATKRQVPEIDQFWRLLALCHTVMPERDKGQLVYQAQSPDEHALTSAARNFGYVFRARTPQSITIEVMGNEETHELLAILDFNNDRKRMSVIVKGPDGKIRLYCKGADMMIMQRIHPSTSQIMRTSTNTHLADFANIGLRTLCLGYKDLDPAYFSDWDSRVKKASAAMQDRESAVDALYEEIEKDLILIGATAIEDKLQDGVPEAIARLSEANIKIWVLTGDKTETAINIAYSCRLLTDETKEIVVVDGQTDTEVEVQLKDTRNTFEQILALPSPLGGKPRIEIETIHEESEAISSARSMDRNIVTPDLKSAEMAEHESGGVALVINGDSLAFALGPRLERTFLEVACMCNAVICCRVTPLQKAQVVDLVKRNKKAVTLSIGDGANDVSMIKTAHIGVGISGQEGMQAVLASDYSIGQFKYLERLLLVHGRWSYIRMAKFLRYFFYKNFAFTLTNFWYSFFCGYSAQTVFDAVLIACYNLFFTALPVLAMGSLDQDVDDHYSLRYPKLYLPGQFNLFFNMRIFIYSVLHGMFSSLVIFFIPYGAFYNAAAASGKDLDDYSALAFTTFTALVVVVTGQIAFDTSYWTAISHFVIWGSLVLYFLVCFLLYEWLPVSWIVKTSSSISYGVAFRTMVTPHFWFSILMVSVVLLLPVMLNRFFWLDTHPSFADRLRIRKKMGKKPSAKDDKKTAFKRTAATRRSVRGSLRSGYAFSHSQGFGELILKGKLFKNVENLRGKNNSNAKIHPTSDDLQPMLISSVPDDSQGASSINAMHLPMGTRPQNVPHTLNVNTDDWSQSSDFRPAYAKEPSPLQGTVIRGDGRSHRNHVYSRETQVEEQPDVITRL

SEQ ID NO: 22714 - protein, 1051 aa, Caenorhabditis elegans
MMNSGKTKFKRTSLDRFLNILIVGIVLFLIAMCLICTILCAVWEYQTGRYFTIYLPWDDVVPSPEQRGGRQIALIAFLQFFSYIILLNTVVPISLYVSVEIIRFIHSLWINYDTQMYYENGEKSVPAKAHTTTLNEELGQVQYVFSDKTGTLTRNIMTFNKCTINGISYGDIYDHKGEVIETNDKTKSLDFSWNSASEPTFKFFDKNLVDATKRQVPEIDQFWRLLALCHTVMPERDKGQLVYQAQSPDEHALTSAARNFGYVFRARTPQSITIEVMGNEETHELLAILDFNNDRKRMSVIVKGPDGKIRLYCKGADMMIMQRIHPSTSQIMRTSTNTHLADFANIGLRTLCLGYKDLDPAYFSDWDSRVKKASAAMQDRESAVDALYEEIEKDLILIGATAIEDKLQDGVPEAIARLSEANIKIWVLTGDKTETAINIAYSCRLLTDETKEIVVVDGQTDTEVEVQLKDTRNTFEQILALPSPLGGKPRIEIETIHEESEAISSARSMDRNIVTPDLKSAEMAEHESGGVALVINGDSLAFALGPRLERTFLEVACMCNAVICCRVTPLQKAQVVDLVKRNKKAVTLSIGDGANDVSMIKTAHIGVGISGQEGMQAVLASDYSIGQFKYLERLLLVHGRWSYIRMAKFLRYFFYKNFAFTLTNFWYSFFCGYSAQTVFDAVLIACYNLFFTALPVLAMGSLDQDVDDHYSLRYPKLYLPGQFNLFFNMRIFIYSVLHGMFSSLVIFFIPYGAFYNAAAASGKDLDDYSALAFTTFTALVVVVTGQIAFDTSYWTAISHFVIWGSLVLYFLVCFLLYEWLPVSWIVKTSSSISYGVAFRTMVTPHFWFSILMVSVVLLLPVMLNRFFWLDTHPSFADRLRIRKKMGKKPSAKDDKKTAFKRTAATRRSVRGSLRSGYAFSHSQGFGELILKGKLFKNVENLRGKNNSNAKIHPTSDDLQPMLISSVPDDSQGASSINAMHLPMGTRPQNVPHTLNVNTDDWSQSSDFRPAYAKEPSPLQGTVIRGDGRSHRNHVYSRETQVEEQPDVITRL

SEQ ID NO: 22715 - protein, 815 aa, Caenorhabditis elegans
TFFILYNNLIPISLQVTLEVVRFFQAIYINNDIEMYDVNSDSCAIARTSNLNEELGQVKFIMSDKTGTLTRNVMKFKRLSIGSRNYGNNEDDEFADASLIEDYRQGDEHSTSILEVLKMMAVCHTVVPENKDGQLIYQSSSPDEAALVRGAASQSVSFHTRQPQKVICNVFGEDETIEILDVIDFTSDRKRMSVIVRDGAGGDIKLYTKGADTVIFERLEHGKEQEEAVEYCTEHLEDYASFGYRTLCFSMRHLTEQEYSQWAPEYKKAILAIDNRAKLLADAAEKLERNMILVGATAIEDKLQEWVPETIQALMAADIRVWMLTGDKRETAINIAHSCALCHTNTELLIVDKTTYEETYQKLEQFVARAIELEKQEKGFAMVIDGKSLLHALTGEARKHFGDLALRCHAVVCCRMSPMQKAEVVEMVRKLAKHVVLAIGDGANDVAMIQAANVGVGISGEEGLQAASASDYAIPRFHFLRRFLLVHGAWNHDRSVKVILYSFYKNICLYIIELWFAMFSAWSGQTIFERWTIGMFNVIFTAWPPVVLGLFDHPVPAEQIMKYPALYASFQNRAFSIGNFSLWIGLAIVHSLSLFFLTYATMEHQVVWDNGLTGGWLMLGNCAYTFVVATVCFKALLECDSWTWPVVVACIGSIGLWIVFVIVYSLVFPHIGGIGADMAGMAAIMMSSYTFWLALLFIPLATLLWDLVIKSLFTIAMPTPRELAVMYNKRTTSFNGFERLASYSSNVLENMRLLTSSLRGSTTGSTRSRTASEASLALAEQTRYGFAFSQDESSAVAQTELIRNVDSTREKPTGR

SEQ ID NO: 22716 - protein, 632 aa, Caenorhabditis elegans
MPTEARDNNRHIHLGKVRDPHHQHAQRFCSNRISTCKYNGFSFLPRFLYEQFRRYNNIFFLAIALLQQIPDVSPTGRYTTAVPFLIILSVSALKEIFEDVKRRRSDNKVNAFSVEILVDGHWIEKQWKDVSVGDFIRIDNDSLFPADLLLLASSEQQGMAYIETSNLDGETNLKIKQALDITSTMTSPEKLSQFESEITCEPPSRHVNEFNGNIEINGVARHFGIDQLLLRGARLKNTAWIFGAVIYTGHDSKLLMNSKRAPLKSGTIDVQTNYRIIFLFFVLVALALISATGSEIWRGNNIPQAWYLSFLEHDPKGSFLWGVLTFFILYNNLIPISLQVTLEVVRFFQAIYINNDIEMYDVNSDSCAIARTSNLNEELGQVKFIMSDKTGTLTRNVMKFKRLSIGSRNYGNNEDDEFADASLIEDYRQGDEHSTSILEVLKMMAVCHTVVPENKDGQLIYQSSSPDEAALVRGAASQSVSFHTRQPQKVICNVFGEDETIEILDVIDFTSDRKRMSVIVRDGAGGDIKLYTKGADTVIFERLEHGKEQEEAVEYCTEHLEDYASFGYRTLCFSMRHLTEQEYSQWAPEYKKAILAIDNRAKLLADAAEKLERNMILVGATAIEDKLQEVGK

SEQ ID NO: 22717 - protein, 1150 aa, Drosophila melanogaster
MPSIFRFRLPFRRSELPETGLLNTYDEDFTSSAGYDADDGERRIINLNGPQPTKYGNNRITTAKYSFISFLPAFLFEQFRRYSNCFFLLIAILQQIPEVSPTGRYTTLVPLMFILSVSAIKEIIEDIKRHRADNEINHRSIERLDSGSWCTVRWSELTVGDIIKVGINTFFPADLILLSSSEPQAMCFIETANLDGETNLKIRQALPATAELLETKDLQRLEGRIECELPNRHLYEFNGVLRETGKPPAALGNDQVLQRGAILRNTAWVFGIVVYSGQETKLMKNSTSAPLKRSTVDKLTNTQILMLFMILISLCIISGLCNLFWTREHSETDWYLGLTDFKTKSLGYNLLTFFILYNNLIPISLQVTLELVRFLQAIFINYDIEMYHEESNTPAMARTSNLNEELGMVKYIFSDKTGTLTQNVMEFKKCSIAGYVYTAERTPEESQLVQNILGRHETSAVIEEFLELLSVCHTVIPERKENGNMIYHAASPDERALVEGAQKFGYIFDTRTPKYVEINALGVRKRYEVLNVLEFTSSRKRMSLIVRTPENKIKLFCKGADTVIYERLAPQGQAFREQTLRHLEEFASDGLRTLCLAVADIRPDVYQEWSQTFDKASVALQNRESKLEDAANLIENNLRLLGATAIEDRLQDGVPETIASLLDAGIYIWVLTGDKQETAINIGYSCRLISHSMDIIILNEESLDATREVIHRHYGEFKSSSAKDANVALVIDGTTLKYALSCDLRNDFQDLCILCRVVICCRVSPMQKAEVVEMVTQSTNAVTLAIGDGANDVAMIQKANVGIGISGVEGLQAACASDYSIAQFRYLQRLLLVHGAWNYARISKLILYSFYKNVCLYVIELWFAVYSGWSGQILFERWTIGLYNVLFTAMPPFAMGLFEKFCTAETMIRYPMLYKTSQNAKLFNVKVFWIWIFNALLHSVFLFWLPLAAYTKEVIWSDGKTSDYLLMGNLVYTYVIVTVCLKAGLITNSWTWLTHLAIWGSIVLWFGFLLIYSHVWPMFKFASNFRGMDIQLLSTPVFYFCLMLVPITTLLIDVICKLVHNTVFKTLTEAVRETEIRRSDISEVMNEPRSSFTETARLLRNVFTRRANTRVETDLELSHGYAFSQEEGGAVPQSIIIRAYDTNLPKPEGN

SEQ ID NO: 22718 - protein, 1360 aa, Drosophila melanogaster
MADSGKHASGGHNGANSERRNDQNGRNGRNGHNGHSQGRQLQFLDNPPPSQATFNVRSLWPSIKSGVRRLRSQLLRRTATTGPAMAPSGGADLPPSDNDRAAPSRSGDGNTETDGSNPHRRLDESSVMGSMQSVKNYIKRTRPGRKKRKDDEDFTSSAGYDADDGERRIINLNGPQPTKYGNNRITTAKYSFISFLPAFLFEQFRRYSNCFFLLIAILQQIPEVSPTGRYTTLVPLMFILSVSAIKEIIEDIKRHRADNEINHRSIERLDSGSWCTVRWSELTVGDIIKVGINTFFPADLILLSSSEPQAMCFIETANLDGETNLKIRQALPATAELLETKDLQRLEGRIECELPNRHLYEFNGVLRETGKPPAALGNDQVLQRGAILRNTAWVFGIVVYSGQETKLMKNSTSAPLKRSTVDKLTNTQILMLFMILISLCIISGLCNLFWTREHSETDWYLGLTDFKTKSLGYNLLTFFILYNNLIPISLQVTLELVRFLQAIFINYDIEMYHEESNTPAMARTSNLNEELGMVKYIFSDKTGTLTQNVMEFKKCSIAGYVYTAERTPEESQLVQNILGRHETSAVIEEFLELLSVCHTVIPERKENGNMIYHAASPDERALVEGAQKFGYIFDTRTPKYVEINALGVRKRYEVLNVLEFTSSRKRMSLIVRTPENKIKLFCKGADTVIYERLAPQGQAFREQTLRHLEEFASDGLRTLCLAVADIRPDVYQEWSQTFDKASVALQNRESKLEDAANLIENNLRLLGATAIEDRLQDGVPETIASLLDAGIYIWVLTGDKQETAINIGYSCRLISHSMDIIILNEESLDATREVIHRHYGEFKSSSAKDANVALVIDGTTLKYALSCDLRNDFQDLCILCRVVICCRVSPMQKAEVVEMVTQSTNAVTLAIGDGANDVAMIQKANVGIGISGVEGLQAACASDYSIAQFRYLQRLLLVHGAWNYARISKLILYSFYKNVCLYVIELWFAVYSGWSGQILFERWTIGLYNVLFTAMPPFAMGLFEKFCTAETMIRYPMLYKTSQNAKLFNVKVFWIWIFNALLHSVFLFWLPLAAYTKEVIWSDGKTSDYLLMGNLVYTYVIVTVCLKAGLITNSWTWLTHLAIWGSIVLWFGFLLIYSHVWPMFKFASNFRGMDIQLLSTPVFYFCLMLVPITTLLIDVICKLVHNTVFKTLTEAVRETEIRRSDISEVMNEPRSSDSGFGYALGKLIRSSHILISHDHHPVSESSRTSNLRVENLEMEADTEQQQQSRQRQKWRGGQVATGVARSARNSTTSPITATLHIFTETARLLRNVFTRRANTRVETDLELSHGYAFSQEEGGAVPQSIIIRAYDTNLPKPEGN

SEQ ID NO: 22719 - protein, 1235 aa, Drosophila melanogaster
MPSIFRFRLPFRRSELPETGLLNTYDEDFTSSAGYDADDGERRIINLNGPQPTKYGNNRITTAKYSFISFLPAFLFEQFRRYSNCFFLLIAILQQIPEVSPTGRYTTLVPLMFILSVSAIKEIIEDIKRHRADNEINHRSIERLDSGSWCTVRWSELTVGDIIKVGINTFFPADLILLSSSEPQAMCFIETANLDGETNLKIRQALPATAELLETKDLQRLEGRIECELPNRHLYEFNGVLRETGKPPAALGNDQVLQRGAILRNTAWVFGIVVYSGQETKLMKNSTSAPLKRSTVDKLTNTQILMLFMILISLCIISGLCNLFWTREHSETDWYLGLTDFKTKSLGYNLLTFFILYNNLIPISLQVTLELVRFLQAIFINYDIEMYHEESNTPAMARTSNLNEELGMVKYIFSDKTGTLTQNVMEFKKCSIAGYVYTAERTPEESQLVQNILGRHETSAVIEEFLELLSVCHTVIPERKENGNMIYHAASPDERALVEGAQKFGYIFDTRTPKYVEINALGVRKRYEVLNVLEFTSSRKRMSLIVRTPENKIKLFCKGADTVIYERLAPQGQAFREQTLRHLEEFASDGLRTLCLAVADIRPDVYQEWSQTFDKASVALQNRESKLEDAANLIENNLRLLGATAIEDRLQDGVPETIASLLDAGIYIWVLTGDKQETAINIGYSCRLISHSMDIIILNEESLDATREVIHRHYGEFKSSSAKDANVALVIDGTTLKYALSCDLRNDFQDLCILCRVVICCRVSPMQKAEVVEMVTQSTNAVTLAIGDGANDVAMIQKANVGIGISGVEGLQAACASDYSIAQFRYLQRLLLVHGAWNYARISKLILYSFYKNVCLYVIELWFAVYSGWSGQILFERWTIGLYNVLFTAMPPFAMGLFEKFCTAETMIRYPMLYKTSQNAKLFNVKVFWIWIFNALLHSVFLFWLPLAAYTKEVIWSDGKTSDYLLMGNLVYTYVIVTVCLKAGLITNSWTWLTHLAIWGSIVLWFGFLLIYSHVWPMFKFASNFRGMDIQLLSTPVFYFCLMLVPITTLLIDVICKLVHNTVFKTLTEAVRETEIRRSDISEVMNEPRSSDSGFGYALGKLIRSSHILISHDHHPVSESSRTSNLRVENLEMEADTEQQQQSRQRQKWRGGQVATGVARSARNSTTSPITATLHIFTETARLLRNVFTRRANTRVETDLELSHGYAFSQEEGGAVPQSIIIRAYDTNLPKPEGN

SEQ ID NO: 22720 - protein, 1060 aa, Drosophila melanogaster
MGADKKKSADPLRIQIGGIESRQQKPLNRVTTTKYTWFTFLPLNFYEQFRRAVYFYFLIITIVSFFVNETISPLVSLLPLLFVMIITALKEGLEDYSRSKSDKLVNTARVTVIRNGKEEIINSQFIVPGDLVVVRNDGDVPCDLVLLQSSSADRKCFVNTANLDGETNLKTICVPTNYLLAGDHELQGKDCIVCEPSSADLYTFNGRLELRSGNDGAGSSAGDALPLTIDNLLLRGVRVKSTERVVGCAIYTGMHTKLQLNSRYTGNKSASSEKYINRFMVALIVGMIVVVVVLYLIERHKEAKIVPTMPYQGPPTNFNSAWQIFEDFLSFLLLFNYMVPISAYMNIEVYRIFGMHFMHNDLHLYDEETDQPCRVNASNLNEELGQVNILFSDKTGTLTKNLMKFVNCYVPGTNYQLQNTHLVSEGTDEKFELEKLDADAAVLFEALAVCHTVEVLQEVGDKTLESSESVSEQSHLMSRNIVDRYQASSPDEKALLEGCASLGLVYEGQENDVLSICRYPSAEKVQFKRLHVLEFSSERQRMSVIVRDQSDTIWLYSKGAESAIFPRCKASPLVEQTDAQITKYAQNGLRTMAVGRRMLTDDELFHFEELYRKANTQLSNRNELIASCYETVENELDLLGATALEDALQEHVGETLEALQAAGLKIWVLTGDKVETAYNIGLACRHIPRGSKQHFIINTTEPAELLARLDMIGDDEPEVLIVDGTTITALLEHTPRQFADLALRCRAVLCCRLSPLQKSEIVTLIKRRKKYITAAIGDGANDVSMIQEAHIGIGITGREGKQAARCADFSIARFEMLRRLFLVHGHYNSQRLAFLVLFYCYKNIIITGCMALYQVYDLYSATNVYNSIYLWLFDIVYISFSFTVLAICDKDYSEETLLSHPELYKPLAHNRQASMGVFSLWILNGFVQCFIIFFFTYAMLNDANVLFNGGQTASFQTFGTMLITIIVIVGNLKLLLVAHYMTYRNFAMILASIAAFMLTTYLYNLYTSGELYDVYNQFLSSLPIWLFTIICSVACLLPDFVIKVVNDMYRKVPLKSKPVV

SEQ ID NO: 22721 - protein, 1509 aa, Plasmodium yoelii yoelii
MPQHIKGDNVEASETQIRINGVNKRRHTNSVITSKYTIFNFIFLNAYEQFHKISNIYFFIIGVLQLVPELTATNRIPTILFPLSIVLIANAINDAYEDWNRHRTDKIENNRVCYVISDGDLSQPNISSNVFIKFIQYLKNILFKKSKKIDSIESYYDDEEEDEEEEVIDEIADTNYFINSYDDRLENIDGTIQKRWKDIEVGDIIICRRSDFFCADILLLSSSDPNGICFAETSSLDGETNLKVKEVNKYIFNNLTYNIDEAIEKAKKLRGYILSEKPNKNLSTMNGAIYLESDVNTDVTNNKEIKKSISEGSSHREEIETKKDINNNFIENKSNDDLNSYKHDDKYVKLPFDEKNFVLRGCKLKNIDWVIGMAIYIGKETKIQMNSLKPVIKYSKLEILTNKLTIIIWLIQVFMCIISAYYSAVIVSFSKKSKFKYLPFNLVDPRAPIVSGIVSFFSWIVITANFIPICLIVTMSFVKVVQAYFISCDNNMVYKVEENIPSFVESRQKSMKSRKNFSIEIDETHNKLNEGKSMVGTDKKNGTNPSDSTKIILNSEDDNSDIFKKKSTRMRTFKESREKSYISFNAIPRTSSLIEELGQIEYIFSDKTGTLTCNVMEFRKCAINGISYGTGLTEIKRKILKKNNIPIPQEPVDLDPKNKTPNVNIVDKKLVNQLKDVNHFNHASLIYFFLHLAINHCVMCDTSDNVNTYSSSSPDEEALVYAAKHFGITFLYRKDGKCGIKIFDKVYEIDILATVEFTSKRKMSTIVCRIPVPSNESPEPTPIDNDDMSRPRNVNGVTNDIRNTIEKWNNGNLTTGKGGNGMGDSPVNLSTEKELNISSAAIEQVKDNVANSDVKKEKMINKESNKIEKKNSKDKQTETNNDVISCKNTKKHKIVVFCKGAGCVIIKKLAKKTDVDDLTIEHMETYADEGLRTLCIAYKELSQEEFAVWYNSYKEASLSLNGREENIEKIAEDIEKDLILQGVTGIEDKLQEGVGATIEDLRLSGIHVWMLTGDKIETAINIGIATNLIDNGSEQFIYTEELALNEDLLMKKLDEDIIYIEKSLNLLHFNFDTNKVEESFFKKMISNKYKNTDSLALDHDTYKEDMTLNNNVLIVDGNVLDILLSKPFERKFFYLADKCSSVICGRVSPYQKGSIVSSANRLLKKNTLAIGDGANDCNMIKMANIGVGIRGQEGVQAFNSSDYGISQFRFLRNLILIHGRLSYRRISKLVVYMFYKNIVFIFPLFIYGSISLYSGQKIYYEFLLHLYNVMFTSLPIVILAILDKDVSLNTALNNPCLYKLGIHNFYFNINKFISWVLNSLFQGLLVFIIPLYFLAYYNIPSSTGEPFDIWSIGCVTYLLAVLIVNIKILLETYYLNTSPIVAVSMSIISFIIMSIAFSFIGIGNKSFLGVAILLVKSLRFWLVLLLVLFTALTRDYVYKVYKKNFYPEAYHLLQDEEENNSNTKHIQYSSKCSNNVDETKSSKSEFMGYAFSEADPVCVHFIRKQDKLI

SEQ ID NO: 22722 - protein, 2228 aa, Plasmodium yoelii yoelii
MQTKKGNEKVNNRYKVKRSSKLFSSNSNMKNPDNIENKLSNNFATAEAAWIEKKQKLYKDTNNQPLWDFRKIQINPTDIDELFSFPPNKITSTKYGSYTFVFRILYEQLIRLPNLWFLIISLLEYIPSFQILSDHLYYYKHSSIYLLLSFIIISIIKNLYEDSRRSNIDYQINNRLCHIIDGSTSNLKVVKWMELTVGSIIRLVENEQVPADIILLSCNHSDGSVYVETSLVNGETNLKKKYCVNETRNESSVYSVCNIRGRITCEKPNMNMESFNGSLKLDAHPRATSLSINNVVFKGSYIKNTDYVFGVIIYTGVDTKIMKNTLRNTYKSGYVNKELNTYTIITIIFVFFCVFISILCKWTDDNKYKHGTNLLLITATNGLFKYIMKYIILYSNIIPISVLITLDLISIMQSILIENDNRICVFENETSEPLVSDDNYDIKNLKMKKSYNYFKKYTHFLSNFNLRKFSRSRNSSNNMENYSYNRKSFISTFDKLVKFKNHFNKKDSNHINSKPTSNNIYNRMPAEESYCISENKYTTNFSFSKRSNNNTTSISNYNDDDIIHKQYEIKNIQKKPSYSNVLYKSHSKKSNHIYNELVGEKEISQEINAIHDNQEDDYNNIQNKHDNFSTKDSESKIIKSVSINSKYPIKNENTNIIKYLFPFLFNKKNSNSKIVNLKNYINKYALSQKNSLKDNFYGWGICLNSNMHGDLGNVDFIFTDKTGTLTNNDMSFNICSIAGRVYGRPRKNKNKNKILFSDKSNIYYNTKLENRDFIADQFENRNTLNEENTFNDITNDTIERIKNNPEEIDGDKTHMPNTTKWNIYKGNNMVENKMNEDAKIMNNNCFNTNLDIEDDDDEYKKFLMKNIQDHQKFNENNFDEHTKDSYKKNKSDCASNINDRKKISYPDFDSSQSLGDSSIISSDCSSETDTTSISDYYKSSYDPSSYEYQNSEVNDDMDGDSIQLDYDKKKKKKNDDNDDSKTNQTNKLINKTYIFDKNYLNYLMEHRYPKPKNFRTNVNPEMAKTRCDFNDKKIFIDLNSNTWRSYYIEEFFKCITLCHTIVPYIQFDYIRNKNLAHNSSRHSKVGSNHFERYNNDIKKNTYTDISKTNNELNSNVSRENTYEPKTRRFIRPKKKYSNNSSIFDNTKMFSYSINQAFLDGKRVRPQTSENDYCTKNSLKNENKKNDVIKKESTFQMFVNKFFTKNKIKDKTDKSQNNCTVVKENLKTKKKKKLGDETEDEESNKWNNYYSFTRNKSIMHTGKNHKHGKATKRHSTVSFKRISKEKMMSLSSYSDDKFVTLKCKNKSYNLSYQNSEVSSSHNKKHETDFEDYPSNKIENKSTGTYDDLDKTKDTNVTDNGGSEYNAYLDSIKYQSTSLDEECLIYTSSYLGYRLILRNKNNMCVEIDGNFYNWTIIGINEFTNKRGRMSIVVKPEYMTKGSILYIKGSDASILSLLNLRHSKFFEKKRKKKKKQNFNKYNRTNKYYSVEGEKQINYSTKHHLSDHSLKSEFYETEDYQSGVERKTCKSSIQLDKNNEYDVKDNSEDKKLYMKKKKKNEFKERSRQLEKQLRKFSMKGLRTMVFAFRYLNEKETIEYKKMYDDARMSIYNKETKLENVANHVEKNLTYLGITGVKDRLQKKVMNTMEMLNQSGVRIWMLTGDNIEYSLHIAFLSNFLNSHTKIFHAMLENTSYKKLKREGTALYELFQLEKEEKKPHEKICLLISGKNLQTFLNHNDLQTYFLNMACTSDAVIACRITAKQKAFIVRLIKSRLSPRPNTLAIGDGANDIAMIQEANIGISIMTSKSIISAGYADYCIKNFCYLRKLLFIYGSKHLYSISIILYWNFFKNIILILPVFFYQAYASWSCVKIYPELLHTLISVFWVLIPIIYYMFLQHNLNYDILYNIPLFYALSRRKYNMSILKFLSWAFEAIFYSLVVFFFSYAALSENSHLNNGEVVTINTFGNICFLGCLLISIFRLFLEGSLWSPSIFITCWGCFLFVFFPSILFICIAYLSNEYIREVFRQTFLWNPIYVLLFLWFTTCIICYMFITFTKSLFFPNIYNVVNHWLFEHYQEKYVKYKYSHFISGKSKFLSLKKIRNKLKNKFRRKQKNNNNVKCNFENDVNNNTSIEIKSEKSYKNNDSYLNISLFESNDKTNSTKKFNDQILKKKHEYKLNKNTQLDEEQISNGRNIVLSTNDIHAMEFDEDSVNRNYKNKKNKVNKTKKSQFRC

SEQ ID NO: 22723 - protein, 1424 aa, Plasmodium yoelii yoelii
  unsure (1)..(1424): unsure at all Xaa locations
LISLINEVVDDLKRFIKDLDVNNEIYYTLLQNGNFKKTYSKDITVGDIILIKSKQRVPADCILLRNLSKDEENAIKIEDNKSFVSFRVNKNSNVYNKKKKKNYYHFNQKFDNALIDDKYNESNNNYSEASNNLLFSENEKSPNGMKEGNYLLKDNVEDSNKVGGKNEDNQKKKKKKKXLRKNGIKKKKNDNKLVFNNNSSNETENYTYVKTDKIDGETDWKIKYPISIFQNLKRLKDFFSIDILFILEHPKNDIYKIEASFVMFKYNQYGEFKTVENNNIGNNINDLNISKLNHISDISNILNNNNNNNNQYRSNSFYALKDTEIHANDANKQIGKYEKDEEEDDEEDDEDDDEDEEDEDDEEDVEDEENEEDVEDEKNNLLKKKEGVENLSYKNLGDGNGNNFNNRSMINFVDSEKYEGNNIGTRNGKVENQLILPGNFGDNQPVCNVFPNEDNYNYYNISYRKKLNYDNFILSNSVITSSDVICMVIYTGRDTRVNMSTQISKVKRGMIDKKLNLITVFLFIILALFSMYMCSTKLNNLWYLNFVRFILLFSSVIPISLSVNLNIAKIYYTLVIQKDKEIQTTIIKNSAIIENFGNVDYIFTDKTGTLTENVMVLKIIHIGLDVIHTENEKSGLQNNMRNKVKKKFNKNVLPYNFEDINEDDVDTNSMHLVSNYSINDRKEKGQNNMIRGDKLSAYNYDIENNRINKNYIQSLRQINTKANAMNQINMNGNGYLDFDSYNERIGSSHMKKNNEIGIEKNYVEDNDNMFFEQSKLGINNIMTSDKRNDLIKRFNNVGNNNDSNNNGSDNHNLNVNNYEQRKKKVEQMVDDYLMNKTDLLDYYNDNIDDVEFLKKHKVFQTFLSFLICNNIRTLTKEHNNNDKEKGKKKKEHKEKDFQKKFYYILNVNRKKKNNNNNNRLNKNDKIIETNTNDNYLYDDDDNNNDNFETNSSEDTETFSYSGISYQCSSPDELAFLKYATNCGFILKKKTASKIEIKYKNIALEYDILLHIPFSSETKRMSVFVRNVKNKNIYFFIKGADNILIKKCHEKYKTFIFEESDHLSSVGLRVLVHGFLNIEEQFFHNFSTLYNQNKDVKGQMEKILDLVEKNIKVLAITGVEDKLQEGVGKTIEMLYNSGIKVWVLTGDKIETAICICKNANIKKKKHNIYIFRHENIKSTSQLIREFNSILNNIDSYVLFFDNIIIQNCIKYIPNAFVDFVANARAVVSLLIKKIYKHGTYYKSNKYVCCRCSPIEKKEIALMIKTIKRKKILCIGDGGNDVAMIQSADIGIGVLGKEGKQVVHDSDIIVSKFKNIKKLILYYGNNTFLQTSSLCSFLIHRGFILTYLQFIYSYIFFSIPVAIFQGWLQIGYTTYYTTTPFLSLLLDVKIKKNLIYLYPEIYKNKKHKRKLDLKSFFIIVWMSIFQ

SEQ ID NO: 22724 - protein, 1043 aa, Danio rerio
CGGDERRVDSRTIYVGHRPCPDTEAFIPPKFCDNRIVSSKYTVWNFLPKNLFEQFRRIANFYFLIIFLVQVIVDTPTSPVTSGLPLFFVITVTAIKQGYEDWLRHKADNEVNKYPVTVLEDGRSVKKESEKIKVGDVVEVVEDETFPCDLILLQSSREDGTCFVTTASLDGESNHKTHYTVPDIERDLQVLTAAIECEQPQPDLYKFVGRMHIYKPEQEEAVRSLGPENLLLKGATLKNTKEIYGVAVYTGMETKMALNYQGKSQKRSAVEKSINAFLLVYLCILISKAVVCTTLKYVWQSKEGQDEPWYNEKTQKEKETNMYLKMFTDFLSFMVLFNFIIPVSMYVTVEMQKFLGSFFIKWDNDFFDPEIEEGALVNTSDLNEELGQVEYVFTDKTGTLTQNNMEFIECCIDGFQYRHRDAHGELDGFTVTDGPLNKLQEKAGREKEELFLRALCLCHTVQVKEETLSDQIDGIDGVLPKAEEERGFIASSPDEVALVKGAMEYKLLHVLNFDPVRRRMSVIVQTKSGDTLLFCKGADSSIFPRVRPEEVDRIRLQDGYRTLCVAYKQLSAEEYALADTGLREARLALQDREEKLMAMYNQVETGMSLIGATAVEDRLEEAAETMEALQGAGMKIWVLTGDKMETAKSTCYACRLFQRGTELLELTVRTLEDGRSKREDRLLELLRDYHRRAVQDAPPVKTGVVTRSWSANQEYGFIIDGATLSLVMNPPRDADASLYRGLFLQICQNCTAVLCCRMAPLQKAQIVKMVKNCKGSPITLSIGDGANDVSMILEAHVGIGIKGKEGRQAVRNSDYAIPKLKHLKKLLLAHGHLYYVRIAHLVQYFFYKNLCFILPQFLYQFFCGYSQQPLYDAAYLTMYNICFTSMPILAYSLLEQHIAIEILLDNATLYREIAKNAMLRWRPFLYWTVLGIFQGLLFFFGVRFLFSNPALQDNGQLALDTRHWTWINHFVIWGSLAFYVFFSFFWGGIIWPFLKQQRLYFVFANMLSSVSAWLVIIILILLSLLPEILLAVLRKPKGPHSRQ

SEQ ID NO: 22725 - protein, 653 aa, Macaca fascicularis
MACNLCYEAESPDEAALVYAARAYQCTLQSRTPEQVMVDFAASGPLTFQLLHILPFDSVRKRMSVVVRHPLSNQVVVYTKGADSVIMELLSVASPDGAGPEKQQMIIREKTQRHLDDYAKQGLRTLCIAKKVMSDTEYAEWLRNHFLAETSIDNREELLLESAMRLENKLTLLGATGIEDRLQEGVPESIEALHKAGIKIWMLTGDKQETAVNIAYACMLMSTILKELQKKTQALPEQVSLSVDLHQPPVPQDSGLRAGLIITGKTLEFALQESLQKQFLELTSWCQTVVCCRATPLQKSEVVKLVRSHLQVMTLAIGDGANDVSMIQVADIGIGVSGQEGMQAVMASDFAVSQFKHLSKLLLVHGHWCYTRLSNMILYFFYKNVAYVNLLFWYQFFCGFSGTSMTDYWVLIFFNLLFTSAPPVIYGVLEKDVSAETLMQLPELYKSGQKSEAYLPHTFWITLLDAFYQSLVCFFVPYFTYQGSDIDIFAFGNPLNTAALFIILLHLIIESKSLTWIHMLVITGSILSYFLFAIVFGAMCVTCNPPSNPYWIMQEHVLDPVFYLVCILTTCIALLPRFVYRGAGKMNQVTSNYANQSADKSGRRPKPGPSTVFAMKSATSCAIEQGNLSLCETALDQGYSETKAFEMARPCKD

SEQ ID NO: 22726 - protein, 625 aa, Macaca fascicularis
MGSLAQREDLQDDSDKNSAFTWEVQANNRTYNAQFKEKVFLCWQKKKYKTNVIRTAKYNFFSFLPLNLYEQLHRVSNLYFLLIIILQSIPDISTLPWFSLGAPMVCLLFIRATRDLVDDIGRHKSDRTVNNRPCQILMGKSFKRKKWQNLCVGDVVCLHKDNIVPADMLLLASTEPSSLCYVETVDIDGETNLKFRQALMVTHKELTSVKKMASFQGTVTCEAPNSRLHHFVGCLEWNDKKYSLDIGNLLLRGCRIRNTDTCYGMVIYAGFDTKIMKNCGKIHLKRTKLDVLMNKLVVVIFISVEEGPSEEIFAVEPLPHLYRESRTRRSSYAFSHREGYADLITQGTILRRGPGVSSVIASESIDPSDEEAFSSPKESHWHLRKMSFLGKKKRQSQGQMSFLEAQHFPTSSSSFSMDRQSALYSENQLALPRYVLTGTHRLSGSFQEQLPRVQERPLSPKQRPSSPEKLPLTKERSYSHLEKPPLHRESQLSSSESQPQPPGSQSLLSGQLTLESQPDSSEEKSAFSKPSAPLWKSWQKEPLTPKEGMVPLPDKTHESQVETLPPSLAESSTSTSEQPMEVEPWPVEKQSSSSMEWLLVPGEEQPSLPPEEQSLPSAGGTRGQQ

SEQ ID NO: 22727 - protein, 1164 aa, Homo sapiens
MPTMRRTVSEIRSRAEGYEKTDDVSEKTSLADQEEVRTIFINQPQLTKFCNNHVSTAKYNIITFLPRFLYSQFRRAANSFFLFIALLQQIPDVSPTGRYTTLVPLLFILAVAAIKEIIEDIKRHKADNAVNKKQTQVLRNGAWEIVHWEKVAVGEIVKVTNGEHLPADLISLSSSEPQAMCYIETSNLDGETNLKIRQGLPATSDIKDVDSLMRISGRIECESPNRHLYDFVGNIRLDGHGTVPLGADQILLRGAQLRNTQWVHGIVVYTGHDTKLMQNSTSPPLKLSNVERITNVQILILFCILIAMSLVCSVGSAIWNRRHSGKDWYLNLNYGGASNFGLNFLTFIILFNNLIPISLLVTLEVVKFTQAYFINWDLDMHYEPTDTAAMARTSNLNEELGQVKYIFSDKTGTLTCNVMQFKKCTIAGVAYGHVPEPEDYGCSPDEWQNSQFGDEKTFSDSSLLENLQNNHPTAPIICEFLTMMAVCHTAVPEREGDKIIYQAASPDEGALVRAAKQLNFVFTGRTPDSVIIDSLGQEERYELLNVLEFTSARKRMSVIVRTPSGKLRLYCKGADTVIYDRLAETSKYKEITLKHLEQFATEGLRTLCFAVAEISESDFQEWRAVYQRASTSVQNRLLKLEESYELIEKNLQLLGATAIEDKLQDQVPETIETLMKADIKIWILTGDKQETAINIGHSCKLLKKNMGMIVINEGSLDGTRETLSRHCTTLGDALRKENDFALIIDGKTLKYALTFGVRQYFLDLALSCKAVICCRVSPLQKSEVVEMVKKQVKVVTLAIGDGANDVSMIQTAHVGVGISGNEGLQAANSSDYSIAQFKYLKNLLMIHGAWNYNRVSKCILYCFYKNIVLYIIEIWFAFVNGFSGQILFERWCIGLYNVMFTAMPPLTLGIFERSCRKENMLKYPELYKTSQNALDFNTKVFWVHCLNGLFHSVILFWFPLKALQYGTAFGNGKTSDYLLLGNFVYTFVVITVCLKAGLETSYWTWFSHIAIWGSIALWVVFFGIYSSLWPAIPMAPDMSGEAAMLFSSGVFWMGLLFIPVASLLLDVVYKVIKRTAFKTLVDEVQELEAKSQDPGAVVLGKSLTERAQLLKNVFKKNHVNLYRSESLQQNLLHGYAFSQDENGIVSQSEVIRAYDTTKQRPDEW

SEQ ID NO: 22728 - protein, 1161 aa, Homo sapiens [sequence omitted]

SEQ ID NO: 22729 - protein, 1251 aa, Homo sapiens
MSTERDSETTFDEDSQPNDEVVPYSDDETEDELDDQGSAVEPEQNRVNREAEENREPFRKECTWQVKANDRKYHEQPHFMNTKFLCIKESKYANNAIKTYKYNAFTFIPMNLFEQFKRAANLYFLALLILQAVPQISTLAWYTTLVPLLVVLGVTAIKDLVDDVARHKMDKEINNRTCEVIKDGRFKVAKWKEIQVGDVIRLKKNDFVPADILLLSSSEPNSLCYVETAELDGETNLKFKMSLEITDQYLQREDTLATFDGFIECEEPNNRLDKFTGTLFWRNTSFPLDADKILLRGCVIRNTDFCHGLVIFAGADTKIMKNSGKTRFKRTKIDYLMNYMVYTIFVVLILLSAGLAIGHAYWEAQVGNSSWYLYDGEDDTPSYRGFLIFWGYIIVLNTMVPISLYVSVEVIRLGQSHFINWDLQMYYAEKDTPAKARTTTLNEQLGQIHYIFSDKTGTLTQNIMTFKKCCINGQIYGDHRDASQHNHNKIEQVDFSWNTYADGKLAFYDHYLIEQIQSGKEPEVRQFFFLLAVCHTVMVDRTDGQLNYQAASPDEGALVNAARNFGFAFLARTQNTITISELGTERTYNVLAILDFNSDRKRMSIIVRTPEGNIKLYCKGADTVIYERLHRMNPTKQETQDALDIFANETLRTLCLCYKEIEEKEFTEWNKKFMAASVASTNRDEALDKVYEEIEKDLILLGATAIEDKLQDGVPETISKLAKADIKIWVLTGDKKETAENIGFACELLTEDTTICYGEDINSLLHARMENQRNRGGVYAKFAPPVQESFFPPGGNRALIITGSWLNEILLEKKTKRNKILKLKFPRTEEERRMRTQSKRRLEAKKEQRQKNFVDLACECSAVICCRVTPKQKAMVVDLVKRYKKAITLAIGDGANDVNMIKTAHIGVGISGQEGMQAVMSSDYSFAQFRYLQRLLLVHGRWSYIRMCKFLRYFFYKNFAFTLVHFWYSFFNGYSAQTAYEDWFITLYNVLYTSLPVLLMGLLDQDVSDKLSLRFPGLYIVGQRDLLFNYKRFFVSLLHGVLTSMILFFIPLGAYLQTVGQDGEAPSDYQSFAVTIASALVITVNFQIGLDTSYWTFVNAFSIFGSIALYFGIMFDFHSAGIHVLFPSAFQFTGTASNALRQPYIWLTIILTVAVCLLPVVAIRFLSMTIWPSESDKIQKHRKRLKAEEQWQRRQQVFRRGVSTRRSAYAFSHQRGYADLISSGRSIRKKRSPLDAIVADGTAEYRRTGDS

SEQ ID NO: 22730 - protein, 1082 aa, Homo sapiens
GRRFILVLRKILQNEKWMNVKVGDIIKLENNQFVAADLLLLSSSEPHGLCYVETAELDGETNLKVRHALSVTSELGADISRLAGFDGIVVCEVPNNKLDKFMGILSWKDSKHSLNNEKIILRGCILRNTSWCFGMVIFAGPDTKLMQNSGKTKFKRTSIDRLMNTLVLWIFGFLICLGIILAIGNSIWESQTGDQFRTFLFWNEGEKSSVFSGFLTFWSYIIILNTVVPISLYVSVEVIRLGHSYFINWDRKMYYSRKAIPAVARTTTLNEELGQIEYIFSDKTGTLTQNIMTFKRCSINGRIYGEVHDDLDQKTEITQEKEPVDFSVKSQADREFQFFDHHLMESIKMGDPKVHEFLRLLALCHTVMSEENSAGELIYQVQSPDEGALVTAARNFGFIFKSRTPETITIEELGTLVTYQLLAFLDFNNTRKRMSVIVRNPEGQIKLYSKGADTILFEKLHPSNEVLLSLTSDHLSEFAGEGLRTLAIAYRDLDDKYFKEWHKMLEDANAATEERDERIAELYEEIERDLMLLGATAVEDKLQEGVIETVTSLSLANIKIWVLTGDKQETAINIGYACNMLTDDMNDVFVIAGNNAVEVREELRKAKQNLFGQNRNFSNGHVVCEKKQQLELDSIVEETITGDYALIINGHSLAHALESDVKNDLLELACMCKTVICCRVTPLQKAQVVELVKKYRNAVTLAIGDGANDVSMIKSAHIGVGISGQEGLQAVLASDYSFAQFRYLQRLLLVHGRWSYFRMCKFLCYFFYKNFAFTLVHFWFGFFCGFSAQTVYDQWFITLFNIVYTSLPVLAMGIFDQDVSDQNSVDCPQLYKPGQLNLLFNKRKFFICVLHGIYTSLVLFFIPYGAFYNVAGEDGQHIADYQSFAVTMATSLVIVVSVQIALDTSYWTFINHVFIWGSIAIYFSILFTMHSNGIFGIFPNQFPFVGNARHSLTQKCIWLVILLTTVASVMPVVAFRFLKVDLYPTLSDQIRRWQKAQKKARPPSSRRPRTRRSSSRRSGYAFAHQEGYGELITSGKNMRAKNPPPTSGLEKTHYNSTSWIENLCKKTTDTVSSFSQDKTVKL

SEQ ID NO: 22731 - protein, 790 aa, Homo sapiens
MYYIGNDTPAMARTSNLNEELGQVKYLFSDKTGTLTCNIMNFKKCSIAGVTYGHFPELAREPSSDDFCRMPPPCSDSCDFDDPRLLKNIEDRHPTAPCIQEFLTLLAVCHTVVPEKDGDNIIYQASSPDEAALVKGAKKLGFVFTARTPFSVIIEAMGQEQTFGILNVLEFSSDRKRMSVIVRTPSGRLRLYCKGADNVIFERLSKDSKYMEETLCHLEYFATEGLRTLCVAYADLSENEYEEWLKVYQEASTILKDRAQRLEECYEIIEKNLLLLGATAIEDRLQAGVPETIATLLKAEIKIWVLTGDKQETAINIGYSCRLVSQNMALILLKEDSLDATRAAITQHCTDLGNLLGKENDVALIIDGHTLKYALSFEVRRSFLDLALSCKAVICCRVSPLQKSEIVDVVKKRVKAITLAIGDGANDVGMIQTAHVGVGISGNEGMQATNNSDYAIAQFSYLEKLLLVHGAWSYNRVTKCILYCFYKNVVLYIIELWFAFVNGFSGQILFERWCIGLYNVIFTALPPFTLGIFERSCTQESMLRFPQLYKITQNGEGFNTKVFWGHCINALVHSLILFWFPMKALEHDTVLTSGHATDYLFVGNIVYTYVVVTVCLKAGLETTAWTKFSHLAVWGSMLTWLVFFGIYSTIWPTIPIAPDMRGQATMVLSSAHFWLGLFLVPTACLIEDVAWRAAKHTCKKTLLEEVQELETKSRVLGKAVLRDSNGKRLNERDRLIKRLGRKTPPTLFRGSSLQQGVPHGYAFSQEEHGAVSQEEVIRAYDTTKKKSRKK

SEQ ID NO: 22732 - protein, 1300 aa, Homo sapiens
MGTGPAQTPRSTRAGPEPSPAPPGPGDTGDSDVTQEGSGPAGIRGGETVIRAGMGDSPGRGAPERRHKAQPGRARKYEWRPEGPTSMGSLGQREDLQDEDRNSAFTWKVQANNRAYNGQFKEKVILCWQRKKYKTNVIRTAKYNFYSFLPLNLYEQFHRVSNLFFLIIIILQSIPDISTLPWFSLSTPMVCLLFIRATRDLVDDMGRHKSDRAINNRPCQILMGKSFKQKKWQDLCVGDVVCLRKDNIVPADMLLLASTEPSSLCYVETVDIDGETNLKFRQALMVTHKELATIKKMASFQGTVTCEAPNSRMHHFVGCLEWNDKKYSLDIGNLLLRGCRIRNTDTCYGLVIYAGFDTKIMKNCGKIHLKRTKLDLLMNKLVVVIFISVVLVCLVLAFGFGFSVKEFKDHHYYLSGVHGSSVAAESFFVFWSFLILLSVTIPMSMFILSEFIYLGNSVFIDWDVQMYYKPQDVPAKARSTSLNDHLGQVEYIFSDKTGTLTQNILTFNKCCISGRVYGPDSEATTRPKENPYLWNKFADGKLLFHNAALLHLVRTNGDEAVREFWRLLAICHTVMVRESPRERPDQLLYQAASPDEGALVTAARNFGYVFLSRTQDTVTIMELGEERVYQVLAIMDFNSTRKRMSVLVRKPEGAICLYTKGADTVIFERLHRRGAMEFATEEALAAFAQETLRTLCLAYREVAEDIYEDWQQRHQEASLLLQNRAQALQQLLGATAIEDRLQDGVPETIKCLKKSNIKIWVLTGDKQETAVNIGFACELLSENMLILEEKEISRILETYWENSNNLLTRESLSQVKLALVINGDFLDKLLVSLRKEPRALAQNVNMDEAWQELGQSRRDFLYARRLSLLCRRFGLPLAAPPAQDSRARRSSEVLQERAFVDLASKCQAVICCRVTPKQKALIVALVKKYHQVVTLAIGDGANDINMIKTADVGVGLAGQEGMQAVQNSDFVLGQFCFLQRLLLVHGRWSYVRICKFLRYFFYKSMASMMVQVWFACYNGFTGQPLYEGWFLALFNLLYSTLPVLYIGLFEQDVSAEQSLEKPELYVVGQKDELFNYWVFVQAIAHGVTTSLVNFFMTLWISRDTAGPASFSDHQSFAVVVALSCLLSITMEVILIIKYWTALCVATILLSLGFYAIMTTTTQSFWLFRVSPTTFPFLYADLSVMSSPSILLVVLLSVSINTFPVLALRVIFPALKELRAKEEKVEEGPSEEIFTMEPLPHVHRESRARRSSYAFSHREGYANLITQGTILRRGPGVSSDIASESLDPSDEEAASSPKESQ

SEQ ID NO: 22733 - protein, 729 aa, Homo sapiens
PSSDDFCRMPPPCSDSCDFDDPRLLKNIEDRHPTAPCIQEFLTLLAVCHTVVPEKDGDNIIYQASSPDEAALVKGAKKLGFVFTARTPFSVIIEAMGQEQTFGILNVLEFSSDRKRMSVIVRTPSGRLRLYCKGADNVIFERLSKDSKYMEETLCHLEYFATEGLRTLCVAYADLSENEYEEWLKVYQEASTILKDRAQRLEECYEIIEKNLLLLGATAIEDRLQAGVPETIATLLKAEIKIWVLTGDKQETAINIGYSCRLVSQNMALILLKEDSLDATRAAITQHCTDLGNLLGKENDVALIIDGHTLKYALSFEVRRSFLDLALSCKAVICCRVSPLQKSEIVDVVKKRVKAITLAIGDGANDVGMIQTAHVGVGISGNEGMQATNNSDYAIAQFSYLEKLLLVHGAWSYNRVTKCILYCFYKNVVLYIIELWFAFVNGFSGQILFERWCIGLYNVIFTALPPFTLGIFERSCTQESMLRFPQLYKITQNGEGFNTKVFWGHCINALVHSLILFWFPMKALEHDTVLTSGHATDYLFVGNIVYTYVVVTVCLKAGLETTAWTKFSHLAVWGSMLTWLVFFGIYSTIWPTIPIAPDMRGQATMVLSSAHFWLGLFLVPTACLIEDVAWRAAKHTCKKTLLEEVQELETKSRVLGKAVLRDSNGKRLNERDRLIKRLGRKTPPTLFRGSSLQQGVPHGYAFSQEEHGAVSQEEVIRAYDTTKKKSRKK

SEQ ID NO: 22734 - protein, 1010 aa, Homo sapiens
MNQCPVHFIQHGKLVRKQSRKLRVGDIVMVKEDETFPCDLIFLSSNRGDGTCHVTTASLDGESSHKTHYAVQDTKGFHTEEDIGGLHATIECEQPQPDLYKFVGRINVYSDLNDPVVRPLGSENLLLRGATLKNTEKIFGVAIYTGMETKMALNYQSKSQKRSAVEKSMNAFLIVYLCILISKALINTVLKYMWQSEPFRDEPWYNQKTESERQRNLFLKAFTDFLAFMVLFNYIIPVSMYVTVEMQKFLGSYFITWDEDMFDEETGEGPLVNTSDLNEELGQVEYIFTDKTGTLTENNMEFKECCIEGHVYVPHVICNGQVLPESSGIDMIDSSPSVNGREREELFFRALCLCHTVQVKDDDSVDGPRKSPDGGKSCVYISSSPDEVALVEGVQRLGFTYLRLKDNYMEILNRENHIERFELLEILSFDSVRRRMSVIVKSATGEIYLFCKGADSSIFPRVIEGKVDQIRARVERNAVEGLRTLCVAYKRLIQEEYEGICKLLQAAKVALQDREKKLAEAYEQIEKDLTLLGATAVEDRLQEKAADTIEALQKAGIKVWVLTGDKMETAAATCYACKLFRRNTQLLELTTKRIEEQSLHDVLFELSKTVLRHSGSLTRDNLSGLSADMQDYGLIIDGAALSLIMKPREDGSSGNYRELFLEICRSCSAVLCCRMAPLQKAQIVKLIKFSKEHPITLAIGDGANDVSMILEAHVGIGVIGKEGRQAARNSDYAIPKFKHLKKMLLVHGHFYYIRISELVQYFFYKNVCFIFPQFLYQFFCGFSQQTLYDTAYLTLYNISFTSLPILLYSLMEQHVGIDVLKRDPTLYRDVAKNALLRWRVFIYWTLLGLFDALVFFFGAYFVFENTTVTSNGQIFGNWTFGTLVFTVMVFTVTLKLALDTHYWTWINHFVIWGSLLFYVVFSLLWGGVIWPFLNYQRMYYVFIQMLSSGPAWLAIVLLVTISLLPDVLKKVLCRQLWPTATERVQTKSQCLSVEQSTIFMLSQTSSSLSF

SEQ ID NO: 22735 - protein, 933 aa, Homo sapiens
NSGRTKFKRTSIDRLMNTLVLWIFGFLVCMGVILAIGNAIWEHEVGMRFQVYLPWDEAVDSAFFSGFLSFWSYIIILNTVVPISLYVSVEVIRLGHSYFINWDKKMFCMKKRTPAEARTTTLNEELGQVEYIFSDKTGTLTQNIMVFNKCSINGHSYGDVFDVLGHKAELGERPEPVDFSFNPLADKKFLFWDPSLLEAVKIGDPHTHEFFRLLSLCHTVMSEEKNEGELYYKAQSPDEGALVTAARNFGFVFRSRTPKTITVHEMGTAITYQLLAILDFNNIRKRMSVIVRNPEGKIRLYCKGADTILLDRLHHSTQELLNTTMDHLNEYAGEGLRTLVLAYKDLDEEYYEEWAERRLQASLAQDSREDRLASIYEEVENNMMLLGATAIEDKLQQGVPETIALLTLANIKIWVLTGDKQETAVNIGYSCKMLTDDMTEVFIVTGHTVLEVREELRKAREKMMDSSRSVGNGFTYQDKLSSSKLTSVLEAVAGEYALVINGHSLAHALEADMELEFLETACACKAVICCRVTPLQKAQVVELVKKYKKAVTLAIGDEANDVSMIKTAHIGVGISGQEGIQAVLASDYSFSQFKFLQRLLLVHGRWSYLRMCKFLCYFFYKNFAFTMVHFWFGFFCGFSAQTVYDQYFITLYNIVYTSLPVLAMGVFDQDVPEQRSMEYPKLYEPGQLNLLFNKREFFICIAQGIYTSVLMFFIPYGVFADATRDDGTQLADYQSFAVTVATSLVIVVSVQIGLDTGYWTAINHFFIWGSLAVYFAILFAMHSNGLFDMFPNQFRFVGNAQNTLAQPTVWLTIVLTTVVCIMPVVAFRFLRLNLKPDLSDTVRYTQLVRKKQKAQHRCMRRVGRTGSRRSGYAFSHQEGFGELIMSGKNMRLSSLALSSFTTRSSSSWIESLRRKKSDSASSPSGGADKPLKG

SEQ ID NO: 22736 - protein, 945 aa, Homo sapiens
DLCVGDVVCLRKDNIVPADMLLLASTEPSSLCYVETVDIDGETNLKFRQALMVTHKELATIKKMASFQGTVTCEAPNSRMHHFVGCLEWNDKKYSLDIGNLLLRGCRIRNTDTCYGLVIYAGFDTKIMKNCGKIHLKRTKLDLLMNKLVVVIFISVVLVCLVLAFGFGFSVKEFKDHHYYLSGVHGSSVAAESFFVFWSFLILLSVTIPMSMFILSEFIYLGNSVFIDWDVQMYYKPQDVPAKARSTSLNDHLGQVEYIFSDKTGTLTQNILTFNKCCISGRVYGAGPCPRHPQENPYLWNKFADGKLLFHNAALLHLVRTNGDEAVREFWRLLAICHTVMVRESPHQLLYQAASPDEGALVTAARNFGYVFLSRTQDTVTIMELGEERVYQVLAIMDFNSTRKRMSVLVRKPEGAICLYTKGADTVIFERLHRRGAMEFATEEALAAFAQETLRTLCLAYREVAEDIYEDWQQRHQEASLLLQNRAQALQQVYNEMEQDLRLLGATAIEDRLQDGVPETIKCLKKSNIKIWVLTGDKQETAVNIGFACELLSENMLILEEKEISRILETYWENSNNLLTRESLSQVKLALVINGDFLDKLLVSLRKEPRALAQNVNMDEAWQELGQSRRDFLYARRLSLLCRRFGLPLAAPPAQDSRARRSSEVLQERAFVDLASKCQAVICCRVTPKQKALIVALVKKYHQVVTLAIGDGANDINMIKTADVGVGLAGQEGMQAVQNSDFVLGQFCFLQRLLLVHGRWSYVRICKFLRYFFYKSMASMMVQVWFACYNGFTGQPLYEGWFLALFNLLYSTLPVLYIGLFEQDVSAEQSLEKPELYVVGQKDELFNYWVFVQAIAHGVTTSLVNFFMTLWISRDTAGPASFSDHQSFAVVVALSCLLSITMEVILIIKYWTALCVATILLSLGFYAIMTTTTQSFWLFRMPTSA

SEQ ID NO: 22737 - protein, 962 aa, Homo sapiens
CAGEEKRVGTRTVFVGNHPVSETEAYIAQRFCDNRIVSSKYTLWNFLPKNLFEQFRRIANFYFLIIFLVQVTVDTPTSPVTSGLPLFFVITVTAIKQGYEDCLRHRADNEVNKSTVYIIENAKRVRKESEKIKVGDVVEVQADETFPCDLILLSSCTTDGTCYVTTASLDGESNCKTHYAVRDTIALCTAESIDTLRAAIECEQPQPDLYKSLGPENLLLKGATLKNTEKIYGVAVYTGMETKMALNYQGKSQKRSAVEKSINAFLIVYLFILLTKAAVCTTLKYVWQSTPYNDEPWYNQKTQKERETLKVLKMFTDFLSFMVLFNFIIPVSMYVTVEMQKFLGSFFISWDKDFYDEEINEGALVNTSDLNEELGQVDYVFTDKTGTLTENSMEFIECCIDGHKYKGVTQEVDGLSQTDGTLTYFDKVDKNREELFLRALCLCHTVEIKTNDAVDGATESAELTYISSSPDEIALVKGAKRYGFTFLGNRNGYMRVENQRKEIEEYELLHTLNFDAVRRRMSVIVKTQEGDILLFCKGADSAVFPRVQNHEIELTKVHVERNAMDGYRTLCVAFKEIAPDDYERINRQLIEAKMALQDREEKMEKVFDDIETNMNLIGATAVEDKLQDQAAETIEALHAAGLKVWVLTGDKMETAKSTCYACRLFQTNTELLELTTKTIEESERKEDRLHELLIEYRKKLLHEFPKSTRSFKKAWTEHQEYGLIIDGSTLSLILNSSQDSSSNNYKSIFLQICMKCTAVLCCRMAPLQKAQIVRMVKNLKGSPITLSIGDGANDVSMILESHVGIGIKGKEGRQAARNSDYSVPKFKHLKKLLLAHGHLYYVRIAHLVQYFFYKNLCFILPQFLYQFFCGFSQQPLYDAAYLTMYNICFTSLPILAYSLLEQHINIDTLTSDPRLYMKISGNAMLQLGPFLYWTFLAAFEGTVFFFGTYFLFQTASLEENGK

SEQ ID NO: 22738 - protein, 1026 aa, Homo sapiens
MGTGPAQTPRSTRAGPEPSPAPPGPGDTGDSDVTQEGSGPAGIRGGETVIRAGMGDSPGRGAPERRHKAQPGRARKYEWRPEGPTSMGSLGQREDLQDEDRNSAFTWKVQANNRAYNGQFKEKVILCWQRKKYKTNVIRTAKYNFYSFLPLNLYEQFHRVSNLFFLIIIILQSIPDISTLPWFSLSTPMVCLLFIRATRDLVDDMGRHKSDRAINNRPCQILMGKSFKQKKWQDLCVGDVVCLRKDNIVPADMLLLASTEPSSLCYVETVDIDGETNLKFRQALMVTHKELATIKKMASFQGTVTCEAPNSRMHHFVGCLEWNDKKYSLDIGNLLLRGCRIRNTDTCYGLVIYAGFDTKIMKNCGKIHLKRTKLDLLMNKLVVVIFISVVLVCLVLAFGFGFSVKEFKDHHYYLSGVHGSSVAAESFFVFWSFLILLSVTIPMSMFILSEFIYLGNSVFIDWDVQMYYKPQDVPAKARSTSLNDHLGQVEYIFSDKTGTLTQNILTFNKCCISGRVYGPDSEATTRPKENPYLWNKFADGKLLFHNAALLHLVRTNGDEAVREFWRLLAICHTVMVRESPRERPDQLLYQAASPDEGALVTAARNFGYVFLSRTQDTVTIMELGEERVYQVLAIMDFNSTRKRMSVLVRKPEGAICLYTKGADTVIFERLHRRGAMEFATEEALAAFAQETLRTLCLAYREVAEDIYEDWQQRHQEASLLLQNRAQALQQLLGATAIEDRLQDGVPETIKCLKKSNIKIWVLTGDKQETAVNIGFACELLSENMLILEEKEISRILETYWENSNNLLTRESLSQVKLALVINGDFLDKLLVSLRKEPRALAQNVNMDEAWQELGQSRRDFLYARRLSLLCRRFGLPLAAPPAQDSRARRSSEVLQERAFVDLASKCQAVICCRVTPKQKALIVALVKKYHQVVTLAIGDGANDINMIKTADVGVGLAGQEGMQAVQNSDFVLGQFCFLQRLLLVHGRWSYVRICKFLRYFFYKSMASMMVQVWFACYNGFTGSAPV

SEQ ID NO: 22739 - protein, 613 aa, Homo sapiens
MSVIVRTPSGRLRLYCKGADNVIFERLSKDSKYMEETLCHLEYFATEGLRTLCVAYADLSENEYEEWLKVYQEASTILKDRAQRLEECYEIIEKNLLLLGATAIEDRLQAGVPETIATLLKAEIKIWVLTGDKQETAINIGYSCRLVSQNMALILLKEDSLDATRAAITQHCTDLGNLLGKENDVALIIDGHTLKYALSFEVRRSFLDLALSCKAVICCRVSPLQKSEIVDVVKKRVKAITLAIGDGANDVGMIQTAHVGVGISGNEGMQATNNSDYAIAQFSYLEKLLLVHGAWSYNRVTKCILYCFYKNVVLYIIELWFAFVNGFSGQILFERWCIGLYNVIFTALPPFTLGIFERSCTQESMLRFPQLYKITQNGEGFNTKVFWGHCINALVHSLILFWFPMKALEHDTVFDSGHATDYLFVGNIVYTYVVVTVCLKAGLETTAWTKFSHLAVWGSMLTWLVFFGIYSTIWPTIPIAPDMRGQATMVLSSAHFWLGLFLVPTACLIEDVAWRAAKHTCKKTLLEEVQELETKSRVLGKAVLRDSNGKRLNERDRLIKRLGRKTPPTLFRGSSLQQGVPHGYAFSQEEHGAVSQEEVIRAYDTTKKKSRKK

SEQ ID NO: 22740 - protein, 893 aa, Homo sapiens
HAYWEAQVGNSSWYLYDGEDDTPSYRGFLIFWGYIIVLNTMVPISLYVSVEVIRLGQSHFINWDLQMYYAEKDTPAKARTTTLNEQLGQIHYIFSDKTGTLTQNIMTFKKCCINGQIYGDHRDASQHNHNKIEQVDFSWNTYADGKLAFYDHYLIEQIQSGKEPEVRQFFFLLAVCHTVMVDRTDGQLNYQAASPDEGALVNAARNFGFAFLARTQNTITISELGTERTYNVLAILDFNSDRKRMSIIVRTPEGNIKLYCKGADTVIYERLHRMNPTKQETQDALDIFANETLRTLCLCYKEIEEKEFTEWNKKFMAASVASTNRDEALDKVYEEIEKDLILLGATAIEDKLQDGVPETISKLAKADIKIWVLTGDKKETAENIGFACELLTEDTTICYGEDINSLLHARMENQRNRGGVYAKFAPPVQESFFPPGGNRALIITGSWLNEILLEKKTKRNKILKLKFPRTEEERRMRTQSKRRLEAKKEQRQKNFVDLACECSAVICCRVTPKQKAMVVDLVKRYKKAITLAIGDGANDVNMIKTAHIGVGISGQEGMQAVMSSDYSFAQFRYLQRLLLVHGRWSYIRMCKFLRYFFYKNFAFTLVHFWYSFFNGYSAQTAYEDWFITLYNVLYTSLPVLLMGLLDQDVSDKLSLRFLGLYIVGQRDLLFNYKRFFVSLLHGVLTSMILFFIPLGAYLQTVGQDGEAPSDYQSFAVTIASALVITVNFQIGLDTSYWTFVNAFSIFGSIALYFGIMFDFHSAGIHVLFPSAFQFTGTASNALRQPYIWLTIILTVAVCLLPVVAIRFLSMTIWPSESDKIQKHRKRLKAEEQWQRRQQVFRRGVSTRRSAYAFSHQRGYADLISSGRSIRKKRSPLDAIVADGTAEYRRTGDS

SEQ ID NO: 22741 - protein, 908 aa, Homo sapiens
DLCVGDVVCLRKDNIVPADMLLLASTEPSSLCYVETVDIDGETNLKFRQALMVTHKELATIKKMASFQGTVTCEAPNSRMHHFVGCLEWNDKKYSLDIGNLLLRGCRIRNTDTCYGLVIYADGYMFVGFDTKIMKNCGKIHLKRTKLDLLMNKLVVVIFISVVLVCLVLAFGFGFSVKEFKDHHYYLSGVHGSSVAAESFFVFWSFLILLSVTIPMSMFILSEFIYLGNSVFIDWDVQMYYKPQDVPAKARSTSLNDHLGQVEYIFSDKTGTLTQNILTFNKCCISGRVYGEPLPLEQVRRREAALPQCGPAAPRADQRGRGRAGVLAPAGHLPHGDDQLLYQAASPDEGALVTAARNFGYVFLSRTQDTVTIMELGEERVYQVLAIMDFNSTRKRMSVLVRKPEGAICLYTKGADTVIFERLHRRGAMEFATEEALAAFAQETLRTLCLAYREVAEDIYEDWQQRHQEASLLLQNRAQALQQVYNEMEQDLRLLGATAIEDRLQDGVPETIKCLKKSNIKIWVLTGDKQETAVNIGFACELLSENMLILEEKEISRILETYWENSNNLLTRESLSQVKLALVINGDFLDKLLVSLRKEPRALAQNVNMDEAWQELGQSRRDFLYARRLSLLCRRFGLPLAAPPAQDSRARRSSEVLQERAFVDLASKCQAVICCRVTPKQKALIVALVKKYHQVVTLAIGDGANDINMIKTADVGVGLAGQEGMQAVQNSDFVLGQFCFLQRLLLVHGRWSYVRICKFLRYFFYKSMASMMVQVWFACYNGFTGQDVSAEQSLEKPELYVVGQKDELFNYWVFVQAIAHGVTTSLVNFFMTLWISRDTAGPASFSDHQSFAVVVALSCLLSITMEVILIIKYWTALCVATILLSLGFYAIMTTTTQSFWLFRMPTSA

SEQ ID NO: 22742 - protein, 815 aa, Homo sapiens [sequence omitted]

SEQ ID NO: 22743 - protein, 797 aa, Homo sapiens
QRNLFLKAFTDFLAFMVLFNYIIPVSMYVTVEMQKFLGSYFITWDEDMFDEETGEGPLVNTSDLNEELGQVEYIFTDKTGTLTENNMEFKECCIEGHVYVPHVICNGQVLPESSGIDMIDSSPSVNGREREELFFRALCLCHTVQVKDDDSVDGPRKSPDGGKSCVYISSSPDEVALVEGVQRLGFTYLRLKDNYMEILNRENHIERFELLEILSFDSVRRRMSVIVKSATGEIYLFCKGADSSIFPRVIEGKVDQIRARVERNAVEGLRTLCVAYKRLIQEEYEGICKLLQAAKVALQDREKKLAEAYEQIEKDLTLLGATAVEDRLQEKAADTIEALQKAGIKVWVLTGDKMETAAATCYACKLFRRNTQLLELTTKRIEEQSLHDVLFELSKTVLRHSGSLTRDNLSGLSADMQDYGLIIDGAALSLIMKPREDGSSGNYRELFLEICRSCSAVLCCRMAPLQKAQIVKLIKFSKEHPITLAIGDGANDVSMILEAHVGIGVIGKEGRQAARNSDYAIPKFKHLKKMLLVHGHFYYIRISELVQYFFYKNVCFIFPQFLYQFFCGFSQQTLYDTAYLTLYNISFTSLPILLYSLMEQHVGIDVLKRDPTLYRDVAKNALLRWRVFIYWTLLGLFDALVFFFGAYFVFENTTVTSNGQIFGNWTFGTLVFTVMVFTVTLKLALDTHYWTWINHFVIWGSLLFYVVFSLLWGGVIWPFLNYQRMYYVFIQMLSSGPAWLAIVLLVTISLLPDVLKKVLCRQLWPTATERVQTKSQCLSVEQSTIFMLSQTSSSLSF

SEQ ID NO: 22744 - protein, 765 aa, Homo sapiens
ARGERPEPVDFSFNPLADKKFLFWDPSLLEAVKIGDPHTHEFFRLLSLCHTVMSEEKNEGELYYKAQSPDEGALVTAARNFGFVFRSRTPKTITVHEMGTAITYQLLAILDFNNIRKRMSVIVRNPEGKIRLYCKGADTILLDRLHHSTQELLNTTMDHLNEYAGEGLRTLVLAYKDLDEEYYEEWAERRLQASLAQDSREDRLASIYEEVENNMMLLGATAIEDKLQQGVPETIALLTLANIKIWVLTGDKQETAVNIGYSCKMLTDDMTEVFIVTGHTVLEVREELRKAREKMMDSSRSVGNGFTYQDKLSSSKLTSVLEAVAGEYALVINGHSLAHALEADMELEFLETACACKAVICCRVTPLQKAQVVELVKKYKKAVTLAIGDGANDVSMIKTAHIGVGISGQEGIQAVLASDYSFSQFKFLQRLLLVHGRWSYLRMCKFLCYFFYKNFAFTMVHFWFGFFCGFSAQTVYDQYFITLYNIVYTSLPVLAMGVFDQDVPEQRSMEYPKLYEPGQLNLLFNKREFFICIAQGIYTSVLMFFIPYGVFADATRDDGTQLADYQSFAVTVATSLVIVVSVQIGLDTGYWTAINHFFIWGSLAVYFAILFAMHSNGLFDMFPNQFRFVGNAQNTLAQPTVWLTIVLTTVVCIMPVVAFRFLRLNLKPDLSDTVRYTQLVRKKQKAQHRCMRRVGRTGSRRSGYAFSHQEGFGELIMSGKNMRLSSLALSSFTTRSSSSWIESLRRKKSDSASSPSGGADKPLKG

SEQ ID NO: 22745 - protein, 713 aa, Homo sapiens
MSEEKNEGELYYKAQSPDEGALVTAARNFGFVFRSRTPKTITVHEMGTAITYQLLAILDFNNIRKRMSVIVRNPEGKIRLYCKGADTILLDRLHHSTQELLNTTMDHLNEYAGEGLRTLVLAYKDLDEEYYEEWAERRLQASLAQDSREDRLASIYEEVENNMMLLGATAIEDKLQQGVPETIALLTLANIKIWVLTGDKQETAVNIGYSCKMLTDDMTEVFIVTGHTVLEVREELRKAREKMMDSSRSVGNGFTYQDKLSSSKLTSVLEAVAGEYALVINGHSLAHALEADMELEFLETACACKAVICCRVTPLQKAQVVELVKKYKKAVTLAIGDGANDVSMIKTAHIGVGISGQEGIQAVLASDYSFSQFKFLQRLLLVHGRWSYLRMCKFLCYFFYKNFAFTMVHFWFGFFCGFSAQTVYDQYFITLYNIVYTSLPVLAMGVFDQDVPEQRSMEYPKLYEPGQLNLLFNKREFFICIAQGIYTSVLMFFIPYGVFADATRDDGTQLADYQSFAVTVATSLVIVVSVQIGLDTGYWTAINHFFIWGSLAVYFAILFAMHSNGLFDMFPNQFRFVGNAQNTLAQPTVWLTIVLTTVVCIMPVVAFRFLRLNLKPDLSDTVRYTQLVRKKQKAQHRCMRRVGRTGSRRSGYAFSHQEGFGELIMSGKNMRLSSLALSSFTTRSSSSWIESLRRKKSDSASSPSGGADKPLKG

SEQ ID NO: 22746 - protein, 994 aa, Homo sapiens
MSRATSVGDQLEAPARTIYLNQPHLNKFRDNQISTAKYSVLTFLPRFLYEQIRRAANAFFLFIALLQQIPDVSPTGRYTTLVPLIIILTIAGIKEIVEDFKRHKADNAVNKKKTIVLRNGMWHTIMWKEVAVGDIVKVVNGQYLPADVVLLSSSEPQAMCYVETANLDGETNLKIRQGLSHTADMQTREVLMKLSGTIECEGPNRHLYDFTGNLNLDGKSLVALGPDQILLRGTQLRNTQWVFGIVVYTGHDTKLMQNSTKAPLKRSNVEKVTNVQILVLFGILLVMALVSSAGALYWNRSHGEKNWYIKKMDTTSDNFGYNLLTFIILYNNLIPISLLVTLEVVKYTQALFINWDTDMYYIGNDTPAMARTSNLNEELGQVKYLFSDKTGTLTCNIMNFKKCSIAGVTYGHFPELAREPSSDDFCRMPPPCSDSCDFDDPRLLKNIEDRHPTAPCIQEFLTLLAVCHTVVPEKDGDNIIYQASSPDEAALVKGAKKLGFVFTARTPFSVIIEAVSNMRVHFRSPAFVKIVCVKWHVYCKYDQATRAAITQHCTDLGNLLGKENDVALIIDGHTLKYALSFEVRRSFLDLALSCKAVICCRVSPLQKSEIVDVVKKRVKAITLAIGDGANDVGMIQTAHVGVGISGNEGMQATNNSDYAIAQFSYLEKLLLVHGAWSYNRVTKCILYCFYKNVVLYIIELWFAFVNGFSGQILFERWCIGLYNVIFTALPPFTLGIFERSCTQESMLRFPQLYKITQNGEGFNTKVFWGHCINALVHSLILFWFPMKALEHDTVFDSGHATDYLFVGNIVYTYVVVTVCLKAGLETTAWTKFSHLAVWGSMLTWLVFFGIYSTIWPTIPIAPDMRGQATMVLSSAHFWLGLFLVPTACLIEDVAWRAAKHTCKKTLLEEVQELETKSRVLGKAVLRDSNGKRLNERDRLIKRLGRKTPPTLFRGSSLQQGVPHGYAFSQEEHGAVSQEEVIRAYDTTKKKSRKK

SEQ ID NO: 22747 - protein, 914 aa, Homo sapiens
KNLLTKVRDAALWLETLSDSRPAKASLSTTSSIADFFLALTICNSVMVSTTTEPRQRVTIKPSSKALGTSLEKIQQLFQKLKLLSLSQSFSSTAPSDTDLGESLGANVATTDSDERDDASVCSGGDSTDDGGYRSSMWDQGDILESGSGTSLEEALEAPATDLARPEFCYEAESPDEAALVHAAHAYSFTLVSRTPEQVTVRLPQGTCLTFSLLCTLGFDSVRKRMSVVVRHPLTGEIVVYTKGADSVIMDLLEDPACVPDINMEKKLRKIRARTQKHLDLYARDGLRTLCIAKKVVSEEDFRRWASFRREAEASLDNRDELLMETAQHLENQLTLLGATGIEDRLQEGVPDTIATLREAGIQLWVLTGDKQETAVNIAHSCRLLNQTDTVYTINTENQETCESILNCALEELKQFRELQKPDRKLFGFRLPSKTPSITSEAVVPEAGLVIDGKTLNAIFQGKLEKKFLELTQYCRSVLCCRSTPLQKSMIVKLVRDKLRVMTLSIGDGANDVSMIQAADIGIGISGQEGMQAVMSSDFAITRFKHLKKLLLVHGHWCYSRLARMVVYYLYKNVCYVNLLFWYQFFCGFSSSTMIDYWQMIFFNLFFTSLPPLVFGVLDKDISAETLLALPELYKSGQNSECYNLSTFWISMVDAFYQSLICFFIPYLAYKGSDIDVFTFGTPINTISLTTILLHQAMEMKTWTIFHGVVLLGSFLMYFLVSLLYNATCVICNSPTNPYWVMEGQLSNPTFYLVCFLTPVVALLPRYFFLSLQGTCGKSLISKAQKIDKLPPDKRNLEIQSWRSRQRPAPVPEVARPTHHPVSSITGQDFSASTPKSSNPPKRKHVEESVLHEQRCGTECMRDDSCSGDSSAQLSSGEHLLGPNRIMAYSRGQTDMCRCSKRSSHRRSQSSLTI

SEQ ID NO: 22748 - protein, 1019 aa, Homo sapiens
MVFRRCTIMGSEYSHQENAKRLETPKELDSDGEEWTQYQCLSFSARWAQDPATMRSQKGAQPLRRSQSARVPIQGHYRQRSMGHRESSQPPVAFSSSIEKDVTPDKNLLTKVRDAALWLETLSDSRPAKASLSTTSSIADFFLALTICNSVMVSTTTEPRQRVTIKPSSKALGTSLEKIQQLFQKLKLLSLSQSFSSTAPSDTDLGESLGANVATTDSDERDDASVCSGGDSTDDGGYRSSMWDQGDILESGSGTSLEEALEAPATDLARPEFCYEAESPDEAALVHAAHAYSFTLVSRTPEQVTVRLPQGTCLTFSLLCTLGFDSVRKRMSVVVRHPLTGEIVVYTKGADSVIMDLLEDPACVPDINMEKKLRKIRARTQKHLDLYARDGLRTLCIAKKVVSEEDFRRWASFRREAEASLDNRDELLMETAQHLENQLTLLGATGIEDRLQEGVPDTIATLREAGIQLWVLTGDKQETAVNIAHSCRLLNQTDTVYTINTENQETCESILNCALEELKQFRELQKPDRKLFGFRLPSKTPSITSEAVVPEAGLVIDGKTLNAIFQGKLEKKFLELTQYCRSVLCCRSTPLQKSMIVKLVRDKLRVMTLSIGDGANDVSMIQAADIGIGISGQEGMQAVMSSDFAITRFKHLKKLLLVHGHWCYSRLARMVVYYLYKNVCYVNLLFWYQFFCGFSSSTMIDYWQMIFFNLFFTSLPPLVFGVLDKDISAETLLALPELYKSGQNSECYNLSTFWISMVDAFYQSLICFFIPYLAYKGSDIDVFTFGTPINTISLTTILLHQAMEMKTWTIFHGVVLLGSFLMYFLVSLLYNATCVICNSPTNPYWVMEGQLSNPTFYLVCFLTPVVALLPRYFFLSLQGTCGKSLISKAQKIDKLPPDKRNLEIQSWRSRQRPAPVPEVARPTHHPVSSITGQDFSASTPKSSNPPKRKHVEESVLHEQRCGTECMRDDSCSGDSSAQLSSGEHLLGPNRIMAYSRGQTDMCRCSKRSSHRRSQSSLTI

SEQ ID NO: 22749 - protein, 672 aa, Homo sapiens
DCTGDGPWQSNLAPSQLEYYASSPDEKALVEAAARIGIVFIGNSEETMEVKTLGKLERYKLLHILEFDSDRRRMSVIVQAPSGEKLLFAKGAESSILPKCIGGEIEKTRIHVDEFALKGLRTLCIAYRKFTSKEYEEIDKRIFEARTALQQREEKLAAVFQFIEKDLILLGATAVEDRLQDKVRETIEALRMAGIKVWVLTGDKHETAVSVSLSCGHFHRTMNILELINQKSDSECAEQLRQLARRITEDHVIQHGLVVDGTSLSLALREHEKLFMEVCRNCSAVLCCRMAPLQKAKVIRLIKISPEKPITLAVGDGANDVSMIQEAHVGIGIMGKEGRQAARNSDYAIARFKFLSKLLFVHGHFYYIRIATLVQYFFYKNVCFITPQFLYQFYCLFSQQTLYDSVYLTLYNICFTSLPILIYSLLEQHVDPHVLQNKPTLYRDISKNRLLSIKTFLYWTILGFSHAFIFFFGSYLLIGKDTSLLGNGQMFGNWTFGTLVFTVMVITVTVKMALETHFWTWINHLVTWGSIIFYFVFSLFYGGILWPFLGSQNMYFVFIQLLSSGSAWFAIILMVVTCLFLDIIKKVFDRHLHPTSTEKAQLTETNAGIKCLDSMCCFPEGEAACASVGRMLERVIGRCSPTHISRSWSASDPFYTNDRSILTLSTMDSSTC

SEQ ID NO: 22750 - protein, 1149 aa, Bos taurus
MPTMRRTVSEIRSRAEGYEKTDDVSEKTSLADQEEIRTIFINQPQLTKFCNNHVSTAKYNIITFLPRFLYSQFRRAANSFFLFIALLQQIPDVSPTGRYTTLVPLLFILAVAAIKEIIEDIKRHKADNAVNKKQTQVLRNGAWEIVHWEKVNVGDIVIIKGKEYIPADTVLLSSSEPQAMCYIETSNLDGETNLKIRQGLPATSDIKDIDSLMRLSGRIECESPNRHLYDFVGNIRLDGRSTVPLGADQILLRGAQLRNTQWVHGIVVYTGHDTKLMQNSTSPPLKLSNVERITNVQILILFCILIAMSLVCSVGSAIWNRRHSGRDWYLNLNYGGANNFGLNFLTFIILFNNLIPISLLVTLEVVKFTQAYFINWDLDMHYEPTDTAAMARTSNLNVELGQVKYIFSDKTGTLTCNVMQFKKCTIAGVAYGQNSQFGDEKTFSDSSLLENLQNNHPTAPIICEFLTMMAVCHTAVPEREGDKIIYQAASPDEGALVRAAKQLNFVFTGRTPDSVIIDSLGQEERYELLNVLEFTSARKRMSVIVRTPSGKLRLYCKGADTVIYDRLAETSKYKEITLKHLEQFATEGLRTLCFAVAEISESDFQEWRAVYHRASTSVQNRLLKLEESYELIEKNLQLLGATAIEDKLQDQVPETIETLMKADIKIWILTGDKQETAINIGHSCKLRRKNMGMIVINEGSLDGTRETLSRHCTTLGDALRKENDFALIIDGKTLKYALTFGVRQYFLDLALSCKAVICCRVSPLQKSEVVEMVKKQVKVITLAIGDGANDVSMIQTAHVGVGISGNEGLQAANSSDYSIAQFKYLKNLLMVHGAWNYNRGSKCILYCFYKNIVLYIIEIWFAFVNGFSGQILFERWCIGLYNVMFTAMPPLTLGIFERSCRKEYMLKYPELYKTSQNALDFNTKVFWVHCLNGLFHSVILFWFPLKALQYGTVFENGRTSDYLLLGNFVYTFVVITVCLKAGLETSYWTWFSHIAIWGSIALWVVFFGIYSSLWPAVPMAPDMSGEAAMLFSSGVFWMGLLFIPVASLLLDVVYKVIKRTAFKTLVDEVQELEAKSQDPGAVVLGKSLTERAQLLKNVFKKNHVNLYRSESLQQNLLHGYAFSQDENGIVSQSEVIRAYDTTKQRPDEW

SEQ ID NO: 22751 - protein, 1107 aa, Oryctolagus cuniculus
LGFDPPHQSDTRTIYIANRFPQNGLYTPQKFIDNRIISSKYTVWNFVPKNLFEQFRRVANFYFLIIFLVQLMIDTPTSPITSGLPLFFVITVTAIKQGYEDWLRHNSDNEVNGAPVYVVRSGGLVKTRSKNIRGMHLVGDIVRIAKDEIFPADLVLLSSDRLDGSCHVTTASLDGETNLKTHVAVPETAVLQTVANLDTLVAVIECQQPEADLYRFMGRMVITQQMEEIVRPLGPESLLLRGARLKNTKEIFGVAVYTGMETKMALNYKSKSQKRSAVEKSMNTFLTIYLIILISEAIISTILKYTWQAEEKWDEPWYNQKTEHQRNSSKVEYVFTDKTGTLTENEMQFRECSIHGMKYQEINGRLVPEGPTPDSSEGNLSYLSSLSHVNSLSHLTSSSSFRTSPENDTELIKEHDLFFKAVSLCHTVQISSVQTDGIGDGPWQSSLAPSQLEYYASSPDEKALVEAAARIGIVFVGNTEETMEVKILGKLERYKLLHVLEFDSDRRRMSVIVQAPSGERFLFAKGAESSILPKCIGGEIEKTRIHVDEFALKGLRTLCVAYRQFTSKEYEVIDRRLFEARTALQQREEKLADVFHYIEKDLILLGATAVEDRLQDKVRETIEALRMAGIKVWVLTGDKHETAVSVSLSCGHFHRTMNILELTNQKSDSECAEQLRQLARRITEDHVIQHGLVVDGTSLSLALREHEKLFMEVCRNCSAVLCCRMAPLQKAKVIRLIKISPEKPITIGCWDGANDVSMIQEAHVGIGIMGKERRQAARNSDYAIARFKFLSKLLFVHGHFYYIRIATLVQYFFYKNVCFITPQFLYQFYCLFSQQTLYDSVYLTLYNICFTSLPILIYSLLEQHIDPHILQNKPTLYRDISKNRLLSIKTFLYWTILGFSRSFIFLFGSYFLIGKDASLLGNGQMFGNWTFGTLVFTVMVITVTVKMALETHFWTWINHLVTWGSIIFYFVFSLFYGGILWPFLGSQNMYFVFIQLVSSGSAWFAIILMVVTCLFLDVMKKVFDRQLHPTSTEKAQLTETNSSIKCVDSLCCFPEGETTCTSVRRMLERVIGRCSPTHISRSWSASDPFYTNDRSILTLSTMDSSTC

SEQ ID NO: 22752 - protein, 341 aa, Oryctolagus cuniculus
QGYEDWLRHNSDNEVNGAPVYVVRSGGLVKTRSKNIRVGDIVRIAKDEIFPADLVLLSSDRLDGSCHVTTASLDGETNLKTHVAVPETAVLQTVANLDTLVAVIECQQPEADLYRFMGRMIITQQMEEIVRPLGPESLLLRGARLKNTKEIFGVAVYTGMETKMALNYKSKSQKRSAVEKSMNTFLIIYLIILISEAIISTISKYTWQAEEKWDEPWYNQKTEHQRNSSKILRFISDFLAFLVLYNFIIPISLYVTVEMQKFLGSFFIGWDLDLYHEESDQKAQVNTSDLNEELGQVEYVFTDKTGTLTENEMQFRECSIHGMKYQEINGRLVPEGPTPDS

SEQ ID NO: 22753 - protein, 195 aa, Glycine max
  unsure (1)..(195): unsure at all Xaa locations
XVPLLLIHGHWNYQRLGYMIIYNFYRNAIFVLVLFWYVLFTALGLTTAINEWSSVLYSIIYSAFPTIVVGILDKDLSKRTLLKYPQLYGAGLRQEAYNKKLFWLAMADTLWQSIAVFFTPLIAYWGTTVDVTSIGDLWTLSVAILVYLHLAMDVIRWDWITHAAIWGSIVATFIWGIIIDAIPSPSGYLYVLSFP

SEQ ID NO: 22754 - protein, 128 aa, Glycine max
  unsure (1)..(128): unsure at all Xaa locations
XSICHTAIPEVDEDTGEVSYETESPDEAAFVIAAREIGFEFYKRTQTSLSMYELDPVSGDKIERMYKLLNVLEFNSSRKRMSVIVKDEKGRIFLLCKSADSVMFERLAKDGREFEEKTLEHVHEYADX

SEQ ID NO: 22755 - protein, 242 aa, Triticum aestivum
  unsure (1)..(242): unsure at all Xaa locations
XYFEAFAGFSGQSVKHARFMLHHNVYFWDVLXWCVAFCYAVCGIIFTLQFPALYQQGPNNLFFDWYRILGWMANGLYSSLAIFFLNICIFYDQAIRSGGQTADMASVGTTMFSCIIWAVNIQIALTMSHFTWIQHLFVWGSIGTWYVFIITYGMALKSRDNFQIMTEVLGPAPIYWAATLLVTAACNIPYLIHISYQRSCNPLDHHVIQEIKYLRKDVEXRNNWKRERSKARQRSKLPSXPH

SEQ ID NO: 22756 - protein, 135 aa, Triticum aestivum
  unsure (1)..(135): unsure at all Xaa locations
AKTVLMSWIHSSGRXFGEETRSQQNVYCDSGLRTFFLVXHVLDEKGRENFNEYFSTAXXDADKDEKXHEVADNIECDLLXGATAAEDKLQKKVLECIEKLPQAGIKFCVLTXDKMXXAINIGYQIVXLDDDGTNX

SEQ ID NO: 22757 - protein, 137 aa, Triticum aestivum
  unsure (1)..(137): unsure at all Xaa locations
FPALYQQGPKNLFFDWYRILGWMGNGLYSSLAIFFLNLCIFYDQAIRAGGQTADMAAVGTAMFTCIIWAVNMQIALTMSHFTWIQHLFVWGSITTWYIFILAYGMXXLRSRDNYQILLEVLGPAPIYWAATLLVTAX

SEQ ID NO: 22758 - protein, 146 aa, Zea mays
  unsure (1)..(146): unsure at all Xaa locations
XACLQASKDSVARQINEGKKLVNASSGESFALIIDGRSLTYALEDDAKDMFLDLAVGCGSVICCRSSPKQKALVTRLVKTGTGKVTLAIGDGANDVGMIQEADIGVGISGAEGMQXXVAATTSLVLXSRRNQLWIVFISWSMLCSA

SEQ ID NO: 22759 - protein, 112 aa, Zea mays
  unsure (1)..(112): unsure at all Xaa locations
XACLQDGVPEAIEKLREAGIKVWVLTGDKQETAISIGYSCKLLTRDMTQIVINSRSRESCRKSLEDAIAMLFEIAIACDVVLCCRVAPLQKAGIVDLIKKRTSDMTLAIGDX

SEQ ID NO: 22760 - protein, 1355 aa, Saccharomyces cerevisiae; identical to SEQ ID NO: 620

SEQ ID NO: 22761 - protein, 1073 aa, Debaryomyces hansenii
MSYSSASSELEKKNDQMKDGFQPYRMSIEEVTAYFDTDIENGLTSSQAKTVYDIKGGNNLGDDDKISYSKIFAHQMFNAMILVLIISMVIALAIRDWITGGVIGFVVFINILVGFVQELKAEKTMGSLRSLSSPTAFVLRNGDDVTIPADEVVPGDIVHIKVGDTVPADLRLIDTMNLESDEALLTGESLPTGKGPQRDLSDRSVPIPVGDRLNMAFSPSGGSKGRGVGIAVATGLDTEIGTIAQSLRGNDGLIRKVDKSNDRKPKKREYSFAFFGTCKDICLNILGVNVGTPLQRKLSLLAIFLFCVAVIFAIVVMGSQRMIVNREVAIYAICVALSMIPSALIVVLTITMAVGAQVMVLKNVIVRKLDSLEALGGINDICSDKTGTLTQGKMIAKRVWIPNVGTYSVDNLNEPYNPTVGDMSFTKYSPRYAKDADEEINFLPYLPDQPKNFENWLYTATLANIATINQAQDEDSGELVWKAHGDATEIAIQVFTTRLDYARVSLQGNYEHISEYPFDSTIKRMSAVYKSKENGETRVYTKGAVERILGICTHWLGHSDNYEEDYDANYDNSKPIEMTDDDRALIEDNMNALSSQGLRVLAFATRNATDSKDDLSDREQVEKDLTFQGLIGIYDPPRIETADSVKKCHKAGINVHMLTGDHPGTAKAIAQEVGILPHNLYHYSDEVVKSMCMTATQFDGLTDEEIDNLPVLPLVIARCAPQTKVRMIDALHRRKKFVAMTGDGVNDSPSLKKADVGIAMGLNGSDVAKDASDIVLTDDNFASILNAIEEGRRMSTNIQKFVLQLLAENVAQAIYFMVGLVFIDDSGFSVFPLSPIEVLWVLVITSWFPAMGLGQEKASDDILEKPPNSTIFTWEVIIDMLAYGLFMAISCKCCFVIIVYGVGDGYLGIDCNASDTHCDLVFRARSGSFATMTWCALIMAWECVHQENSLFYMRRDTDNPWWKQTAIDLWGNQFLFWSVIVGFVTVFPVVYIPVINNDVFLHKGIGYEWGIAIGFSLFFLLSSETWKWMKRIYKRKQAKKVVNPEYDLERNDPFEKYASFSRSNTFDKNTVLV

SEQ ID NO: 22762 - protein, 1528 aa, Cryptosporidium parvum
MIGSDDSFEPNIQNQTVQSSMATKSSNTFHSIFNKDEKLLEMSSQSSLKDVNSYSPNIATYNCIGNNSSPSSRIVSPISSASFFVDMTPNGRHLLHAEVADEEPNPETCSPNPQKFLQNRLNLLASRNLLNHYVNSNENNYFGKQLSSDVISSIPDLQYNETAVQDMVINKLSMSTQMLPDTIEEARKRDPEFVSKALEQTLEYSEAQKPIHYWSQIELDMLINELSANIIDGIDEGKAIELMEKKYGPNKLQKEKHEPIWRIFLSQFTSLVVSLLLVAGIVSLAFQEWVEGIGILFIVLINASLATYMENNASNALAKLADLSSPKCTVIRSGIINIIPAYNLIPGDIVLLRTGDSVPADVRLIEATEIKCNEALLTGESEDVSKHLVSPDPNNPFPTNICFASTAITNGTGKAIVVLTGMNTQIGRIAQQLKLASGGSNSGTPLQIGLNRLGGFIGFMSLIVLVIIVIVALLTNYKDPSHPNSNPVFGIILVAVGFAVSSIPEGLPMVVTICLSIGCSEMCRRKANIRKLPAVETLGCCSVICSDKTGTLTEGKMTAVKLATFSRNNTKTLNISPTGNEQSPSFVEYQESNSCVFSFYPTRGSDPNGGIFLSSSLTQNIKEEIMNLIHFNKNKTIEMTENHFLESNFEMPPDDKIPYKFINYNSICKDFGDPLNSHLPQTKYVRSALLAGYLNSYGTALVYDNESNSWKTRGNMSEGAIVVAAAKASYGIKNKIFDSRKQDIESKQSSTKKSGHLIRSKLNDQNFKTINNGNNPATEVATSGSSPTQCALDSNSTDSNKLKNYIIDGVNTENKTNLVIEDEIEYLRVPSVEVPFTSSRKMMMTVHSLSTPNKFGDIFFSNTDSKSNKQTNLQNKVSNSNSQRYSKTVDNLDSGVYTHVAILKGAPDRIVKHIGFMLNTDWKNEEPMVHIDYSEKINPQEIFEIENTNKVLSGEALRVLGIAILPLTSEDFFDLVTEECSDKRLQYVLDKNELTLLGLIGFLDPPRPGVEKAITKCCEAGVRVIMITGDQQPTACAIARSIGLLADEYEYKNSYEGSADLHNATSGSIICNQLHENGDASRPHLSNELFDKIVSSVSVFCRAQPEDKIAIVRSLQRQGEVVAMTGDGVNDAPALKAADIGVAMGISGTEVAKGASEMVLLDDNFVTIVNAIEEGRKIYSNVQKFVAFLLGTNIGEIIYLSIAIAAQLPIPIAALQILFLNLMSDGGPAVALSVDPPDPNMMKVPPRPKKSPIMTRDWWIFGNIPHAIFEAICVLSVLIISMYTSLGVFQRNAIESLCLHDSNNRYFCQTNEWRLNLIDLEKTGWVTNIDFYNPLTNSMEQILGVTKGKLNSTLPPSEIPYVKGLYEKAERLGISCVAGKHGWCIPQQKITNDEYIDLVAFGTIRGRTASFIAAVFCEMLRAYTVRTWDWFTKPLFNNPWLHFACSLSASSTLIVTFTPGLQQIFGTHTIYWWLYILAIGAGFLNMAFDELVPKPLYRRIVERRRIRAKLLAERDVNWITRSEQFENT

SEQ ID NO: 22763 - protein, 362 aa, Tetrahymena thermophila
CSDKTGTLTTNEMSVEKFFVAGNKDGSQLAAFEVKGHSYSPEGEIVNFQNFNGSQLAKNIKTFATSMVLNNESKLIFDKNRVNRSGLPTEAAIKVLSEKIGKYDPDFKNKYVPISTGHVEQYGSYLAQDYEKRATLEFSRDRKSMSVLLKCKNVLFIKGAPDYLLKASKKIMNKDGEVVDFTAATKTAFENQIKEYAKAGLRTLAICVKYDTGALVDYTGPSHPAHKQLEDSNNYAKIEEDPIIIGVVAVRDPPRPEVAASIQKCKQAGISVIMITGDIKETAESIARDIGIIQAGDEEFRSLTGHTFENLSEEKQLEYLQQVIDAPSGFVFSRTDPRHKRALVKILSGQNQIVAMTGDGVN

SEQ ID NO: 22764 - protein, 1031 aa, Hydra vulgaris
MADPGDLESRGKADSYSVAEKKSAPKKISKKNANKAKLEDLKKELEMTEHSMKLESLLSMYETSLEKGLSENIVARNLERDGLNALTPPKQTPEWVKFCKQMFGGFSMLLWIGAILCFFAFGIRAVRDTNPNMDELYLGIVLSVVVIITGCFSYYQESKSSKIMESFKKMIPQEALVLRDGKKITINAEQCVVGDVVFVKFGDRIPADIRIVECKGLKVDNSSLTGESEPQSRAVDFTHENPIETKNLAFFSTNAVEGTATGIVVRIGDNTVMGRIANLASGLGSGKTPIALEIEHFIHIVTGVAVFLGVSFLIISLAMGYHWLEAIIFLIGIIVANVPEGLLATVTVCLTLTAKKMAKKNCLVKHLEAVETLGSTSVICSDKTGTLTQNRMTVAHMWFDKMIVEADTTEDQSGIAHDKGSLTWKSLAKVAALCSRAEFKPNQNDVAVLRKECTGDASETAILKFVELSVGNVMDIRAKNKKVTEIPFNSTNKYQVSVHEQENSSGYLLVMKGAPEKVLERCSTILINGEEQPLKDDVIEIYNKAYDELGGLGERVLGFCHYYLPVDQYPKGFLFKTEEEQNFPLEGLCFLGLLSMIDPPRAAVPDAVSKCRSAGIKVIMVTGDHPITAKAIAKGVGIISEGNECEEDIALRLNIPLEDLSEDQKKSAKACVIHGAKLKDIKNEELDKILCDHTEIVFARTSPQQKLIIVEGCQRQGAIVAVTGDGVNDSPALKKADIGVAMGIAGSDVSKQAADMILLDDNFASIVTGVEEGRLIFDNLKKSIVYTLTSNIPEISPFLMFILFGIPLPLGTITILCIDLGTDMVPAISLAYEKAESDIMKRHPRNPIRDKLVNERLISLAYGQIGMMQATAGFFTYFIILAENGFLPSYLFGLRSQWDDMSNNNLLDSFGSEWTYFQRKEIELTCQTAFFTTIVVVQWADLIISKTRRLSLFQQGMTNWFLNFGLFFETALAAFLQYTPGVNTGLRLRPMNFTWWLPGLPFSLLIFVYDEIRRYLLRKNPGGWVEKETYY

SEQ ID NO: 22765 - protein, 1022 aa, Dugesia japonica
MASDEKVNDKGDLKNLKGSPKKSKKDKKKDLDNLKKELDIDSHRIPIKDLYIRLQSDPDKGISYEDAKMRLARDGPNALTPPKTTPEWVKFCKQLFGGFSLLLWIGAVLCFLAYAIQSGAYEDPPKDNLYLGVVLTAVVVITGCFSYYQDAKSSKIMESFGKMVPQKANVIREGKISEISAENLVVGDVIEVKFGDRVPADIRVIQASSFKVDNSALTGESEAQVRTPEFTNDNPLETKNIAFFSTNAVEGTCRGIVISVGDNTVMGRIANLASGLEMGMTPIAKEINHFIHIITGVAVFLGVSFFVIAFILGYFWLDAVIFLIGIIVANVPEGLLATVTVCLTLTAKRMAKKNCLVKNLEAVETLGSTSTICSDKTGTLTQNRMTVAHMWFDNKIQESDTSENQITSSSKQESDTWKMLARISMLCNRAQFKAGEEDKPVLKRDCTGDASESALLKCVELSIGGVTKYREENKKIVEIPFNSTNKYQVSIHETNDGNPGYLIAMKGAPERILERCSTILIDGKEVHMDDHWKQEFNNAYLELGGMGERVLGFCDFRLDENEFPKGFKFNPDEVNFPLDGLRFVGLMSMIDPPRAAVPDAVAKCRSAGIKVIMVTGDHPITAKAIAKGVGIISEGNRTVDDIAAERGISPSEVNPRDARACVIHGSDLRDMTSEQLDEVLKHHDEIVFARTSPQQKLIIVEGCQRQGAIVAVTGDGVNDSPALKKADIGVAMGIAGSDVSKQAADMILLDDNFASIVTGVEEGRIIFDNLKKSIAYTLTSNIPEITPFLVFILADVPLPLGTITILCIDLGTDMVPAISLAYEEAESDIMKRKPRDPKHDKLVNERLISMAYGQIGMIQASGGFFVYFVIMAEQGFWPSRLLGLRKEWDSAAVNDLADSYGQEWTFEQRKKLEYTCHTAFFVSIVIVQWTDLMICKTRRNSIFQQGMWNHQMTFGLFFETTLAAFLTYCPGLDVALKMQPLRFTWWLPAIPFSASIFIYDEVRKYLLRKWKNGSWLENETYY

SEQ ID NO: 22766 - protein, 1039 aa, Callinectes sapidus
MADTGRTDSYRHATDRNIPDDNRTVKGDPKSKKKNVKGKRKGEKEKDMDNLKQELELDEHKVPIEELFQRLSVNPDTGLTQAEARRRLERDGPNALTPPKQTPEWVKFCKNLFGGFSLLLWIGAILCFIAYSIEAASEEEPNNDNLYLGIVLTAVVIITGIFSYYQESKSSRIMESFKNLVPQYAIVIREGEKLNVQAEELCIGDIIDVKFGDRIPADMRVIEARGFKVDNSSLTGESEPQSRSPEFTSENPLETKNLAFFSTNAVEGTCKGIVINIGDNTVMGRIAGLASGLETGETPIAKEISHFIHIITGVAVFLGVTFFVIAFIMGYHWLDAVVFLIGIIVANVPEGLLATVTVCLTLTAKRMAAKNCLVKNLEAVETLGSTSTICSDKTGTLTQNRMTVAHMWFDNTIIEADTSEDQSGCQYDKTSDGWKALSRIAALCNRAEFKTGQEDVPILKREVNGDASEAALLKCVELAIGDVRGWRSRNKKVCEIPFNSTNKYQVSIHETQDKNDLRYLLVMKGAPERILERCSTIFMNGEEKPLDEEMKESFNNAYLELGGLGERVLGFCDYVLPSDKYPLGYPFDADAVNFPVHGLRFVGLMSMIDPPRAAVPDAVAKCRSAGIKVIMVTGDHPITAKAIAKSVGIISEGNETVEDIAQRLNIPIKEVDPREAKAAVVHGSELRDMTSEQLDDVLIHHTEIVFARTSPQQKLIIVEGCQRMGAIVAVTGDGVNDSPALKKADIGVAMGIAGSDVSKQAADMILLDDNFASIVTGVEEGRLIFDNLKKSIAYTLTSNIPEISPFLFFMIASVPLPLGTVTILCIDLGTDMVPAISLAYEEAESDIMKRQPRNPFTDKLVNERLISMAYGQIGMIQALAGFYVYFVIMAENGFLPPVLFGIREQWDSKAINDLEDYYGQEWTYHDRKILEYTCHTAFFVAIVVVQWADLIICKTRRNSILHQGMKNMVLNFGLCFETTLAAFLSYTPGMDKGLRMYPLKFYWWLPPLPFSLLIFVYDECRRFVLRRNPGGWVEMETYY

SEQ ID NO: 22767 - protein, 1037 aa, Ctenocephalides felis
MDDKHGRSDSYRVATVPTIDDNLTADGQYKSRRKTPTKKQRKEGELDDLKQELDIDFHKVSPEELYQRFNTHPENGLSHAKAKENLERDGPNALTPPKQTPEWVKFCKNLFGGFALLLWIGAILCFVAYSIQASTVEEPADDNLYLGIVLAAVVIVTGIFSYYQESKSSKIMESFKNMVPQFATVLREGEKLTLRAEDLVLGDVVEVKFGSRIPADIRIIESRGFKVDKSSLTGESEPQSRGPEFTNEKPLETKNLAFFSINAVEGTAKGVVISCGDNTVMGRIAGLASGLDTGETPIAKEIHHFIHLITGVAVFLGVTFFVIAIILNYHWLDAVIFLIGIIVANVPEGLLATVTVCLTLTAKRMASKNCLVKNLEAVETLGSTSTICSDKTGTLTQNRMTVAHMWFDNQIIEADTTEDQSGVVYDRTSPGFKALARIATLCNRAEFKGGQEGVPILKKEVSGDASEAALLKCMELALGDVMSIRKRNKKVCEIPFNSTNKYQVSIHETEDASDPRHVMVMKGAPERILEKCSTIFIGGKEKLLDEEMKEAFNNAYLELGGLGERVLGFCDLMLPTDKFPLGFKFDSDDPNFPIENLRFVGLMSMIDPPRAAVPDAVAKCRSAGIKVIMVTGDHPITAKAIAKSVGIISEGNETVEDIAQRLNIPVSEVNPREAKAAVVHGTELRELNSDQLDEILRYHTEIVFARTSPQQKLIIVEGCQRMGAIVAVTGDGVNDSPALKKADIGVAMGIAGSDVSKQAADMILLDDNFASIVTGVEEGRLIFDNLKKSIAYTLTSNIPEISPFLAFILCDIPLPLGTVTILCIDLGTDMVPAISLAYEHAEADIMKRPPRDPVNDKLVNSRLISMAYGQIGMIQAAAGFFVYFVIMAENGFLPMKLFGIRKQWDSKAVNDLTDSYGQEWTYRDRKTLEYTCHTAFFVSIVVVQWADLIVCKTRRNSLLHQGMRNWALNFGLVFETALAAFLSYTPGMDKGLRMFPLKFVWWLPALPFMISIFIYDETRRFYLRRNPGGWLEQETYY

SEQ ID NO: 22768 - protein, 1022 aa, Torpedo californica
MGKGAASEKYQPAATSENAKNSKKSKSKTTDLDELKKEVSLDDHKLNLDELHQKYGTDLTQGLTPARAKEILARDGPNALTPPPTTPEWIKFCRQLFGGFSILLWTGAILCFLAYGIQVATVDNPANDNLYLGVVLSTVVIITGCFSYYQEAKSSKIMDSFKNMVPQQALVIRDGEKSSINAEQVVVGDLVEVKGGDRIPADLRIISACSCKVDNSSLTGESEPQSRSPEYSSENPLETKNIAFFSTNCVEGTARGIVINIGDHTVMGRIATLASGLEVGQTPIAAEIEHFIHIITGVAVFLGVSFFILSLILGYTWLEAVIFLIGIIVANVPEGLLATVTVCLTLTAKRMARKNCLVKNLEAVETLGSTSTICSDKTGTLTQNRMTVAHMWFDNQIHEADTTENQSGISFDKTSLSWNALSRIAALCNRAVFQAGQDSVPILKRSVAGDASESALLKCIELCCGSVSQMRDRNPKIVEIPFNSTNKYQLSIHENDKADSRYLLVMKGAPERILDRCSTILLNGEDKPLNEEMKEAFQNAYLELGGLGERVLGFCHLKLSTSKFPEGYPFDVEEPNFPITDLCFVGLMSMIDPPRAAVPDAVGKCRSAGIKVIMVTGDHPITAKAIAKGVGIISEGNETVEDIAARLNIPVNQVNPRDAKACVVHGTDLKDLSHENLDDILHYHTEIVFARTSPQQKLIIVEGCQRQGAIVAVTGDGVNDSPALKKADIGVAMGIAGSDVSKQAADMILLDDNFASIVTGVEEGRLIFDNLKKSIAYTLTSNIPEITPFLVFIIANVPLPLGTVTILCIDLGTDMVPAISLAYERAESDIMKRQPRNPKTDKLVNERLISMAYGQIGMIQALGGFFSYFVILAENGFLPIDLIGIREKWDELWTQDLEDSYGQQWTYEQRKIVEYTCHTSFFVSIVIVQWADLIICKTRRNSIFQQGMKNKILIFGLFEETALAAFLSYTPGTDIALRMYPLKPSWWFCAFPYSLIIFLYDEARRFILRRNPGGWVEQETYY

SEQ ID NO: 22769 - protein, 1009 aa, Electrophorus electricus
MGKGFGRGSSSDEKKKDLDELKKEVALDDHKLSLTDLASRYGVDLNKGLTTKRAAEILERDGPNALTPPPTTPEWVKFCKQLFGGFSILLWIGAILCFFAYSIQVASEDEPVNDNLYLGVVLAAVVIITGCFSYYQESKSSRIMDSFKNMVPQQAMVIRDGEKRQINAEDVVAGDLVEIKGGDRILADVRFISCSGCKVDNSSLTGESEPQSRSPDFTHENPLETKNICFFSTNCVEGTGRGIVIATGDRTVMGRIATLASGLEVGQTPINIEIEHFIHIITAVAVVLGVAFFFLSLVLGYTWLEAVIFLIGIIVANVPEGLLATVTVCLTLTAKRMARKNCLVKNLEAVETLGSTSTICSDKTGTLTQNRMTVAHMWFDNQIQVADTTEDQSGCGAFDKTSPSWKALSRVAGLCNRADFLPGQESVPILKRDTAGDASESALLKCIELSCGSVRSLREKNNKVAEIPFNSTNKFQLSIHEIEESPTGHILVMKGAPERILDRCSSIMISGQDIPLNDEWTNAFQRAYMELGGLGERVLGFCHLNLPPSQFPRGFAFDSEDVNFPTEQMCFLGLMSMIDPPRAAVPDAVGKCRSAGIKVIMVTGDHPITAKAIAKGVGIISEGNETVEDIAERLQVPLSQVNPRDAKACVVHGSDLKDMTSEFLDDLLRNHTEIVFARTSPQQKLIIVEGCQRQGAIVAVTGDGVNDSPALKRADIGIAMGIAGSDVSKQAADMILLDDNFASIVTGVEEGRLIFDNLKKSIAYTLTSNIPEISPFLFFIIASVPLPLGTVTILCIDLGTDMVPAISLAYESAESDIMKRQPRNPKTDKLVNERLISIAYGQIGMIQALAGFFTYFVVLAENGFLPRGLLGLRVDWDSRDVNDIEDSYGQQWTYEQRKIVEFTCHTSFFVSIVVVQWADLIICKTRRNSVFQQGMRNKILIFGLFAETALAAFLSYCPGMDVALRMYPLKLFWWFCALPYSLLIFVYDEVRKLILRRYPGGWVEKETYY

SEQ ID NO: 22770 - protein, 513 aa, Pseudopleuronectes americanus
ERILERCSTILIKGQELPLDEQWKEAFQTAYMDLGGLGERVLGFCHIYLNEKEFPRGYSFDPDEMNFTTSGLCFAGLISMIDPPRATVPDAVMKCRTAGIRVIMVTGDHPITARAIAANVGIISEGSETVEDIAQRKRIPVEQVNKRDARACVISGGQLKDMSSNELDETLKNHPEMVFARTSPQQKLIIVESCQRLGSIVAVTGDGVNDSPALKKADIGIAMGIAGSDAAKNAADMILLDDNFASIVTGVEQGRLIFDNLKKSIAYTLTKNIPELTPYLVYITVSVPLPLGCITILFIELATDIYPSVSLAYEKAESDIMHLKPRNPRRDRLVNEPLAAYSYFQIGAIQSFAGFTDYFAAMAQEGWFPLLCVGLRAQWEDVHLQDLQDSYGQEWTFSQRLYQQYTCYTVFFVSIEICQISDVLIRKTRRLSVFQQGFFRNRVLVSAIVFQLLLGNLLCYCPGMPNIFNFMPIRVQWWFIPVPFGILIFVYDEIRKLGVRRYPGSWWDQELYY

SEQ ID NO: 22771 - protein, 1426 aa, Homo sapiens
MTEALQWARYHWRRLIRGATRDDDSGPYNYSSLLACGRKSSQTPKLSGRHRIVVPHIQPFKDEYEKFSGAYVNNRIRTTKYTLLNFVPRNLFEQFHRAANLYFLFLVVLNWVPLVEAFQKEITMLPLVVVLTIIAIKDGLEGYRKYKIDKQINNLITKVYSRKEKKYIDRCWKDVTVGDFIRLSCNEVIPADMVLLFSTDPDGICHIETSGLDGESNLKQRQVVRGYAEQDSEVDPEKFSSRIECESPNNDLSRFRGFLEHSNKERVGLSKENLLLRGCTIRNTEAVVGIVVYAGHETKAMLNNSGPRYKRSKLERRANTDVLWCVMLLVIMCLTGAVGHGIWLSRYEKMHFFNVPEPDGHIISPLLAGFYMFWTMIILLQVLIPISLYVSIEIVKLGQIYFIQSDVDFYNEKMDSIVQCRALNIAEDLGQIQYLFSDKTGTLTENKMVFRRCSVAGFDYCHEENARRLESYQEAVSEDEDFIDTVSGSLSNMAKPRAPSCRTVHNGPLGNKPSNHLAGSSFTLGSGEGASEVPHSRQAAFSSPIETDVVPDTRLLDKFSQITPRLFMPLDETIQNPPMETLYIIDFFIALAICNTVVVSAPNQPRQKIRHPSLGGLPIKSLEEIKSLFQRWSVRRSSSPSLNSGKEPSSGVPNAFVSRLPLFSRMKPASPVEEEVSQVCESPQCSSSSACCTETEKQHGDAGLLNGKAESLPGQPLACNLCYEAESPDEAALVYAARAYQCTLRSRTPEQVMVDFAALGPLTFQLLHILPFDSVRKRMSVVVRHPLSNQVVVYTKGADSVIMELLSVASPDGASLEKQQMIVREKTQKHLDDYAKQGLRTLCIAKKVMSDTEYAEWLRNHFLAETSIDNREELLLESAMRLENKLTLLGATGIEDRLQEGVPESIEALHKAGIKIWMLTGDKQETAVNIAYACKLLEPDDKLFILNTQSKDACGMLMSTILKELQKKTQALPEQVSLSEDLLQPPVPRDSGLRAGLIITGRTLEFALQESLQKQFLELTSWCQAVVCCRATPLQKSEVVKLVRSHLQVMTLAIGDGANDVSMIQVADIGIGVSGQEGMQAVMASDFAVYQFKHLSKLLLVHGHWCYTRLSNMILYFFYKNVAYVNLLFWYQFFCGFSGTSMTDYWVLIFFNLLFTSAPPVIYGVLEKDVSAETLMQLPELYRSGQKSEAYLPHTFWITLLDAFYQSLVCFFVPYFTYQGSDTDIFAFGNPLNTAALFIVLLHLVIESKSLTWIHLLVIIGSILSYFLFAIVFGAMCVTCNPPSNPYWIMQEHMLDPVFYLVCILTTSIALLPRFVYRVLQGSLFPSPILRAKHFDRLTPEERTKALKKWRGAGKMNQVTSKYANQSAGKSGRRPMPGPSAVFAMKSASSCAIEQGNLSLCETALDQGYSETKAFEMAGPSKGKES

SEQ ID NO: 22772 - protein, 1158 aa, Arabidopsis thaliana
MDPRKSIDKPPHHDPILGVSSRWSVSSKDNKEVTFGDLGSKRIRHGSAGADSEMLSMSQKEIKDEDARLIYINDPDRTNERFEFTGNSIKTAKYSVFTFLPRNLFEQFHRVAYIYFLVIAVLNQLPQLAVFGRGASIMPLAFVLLVSAIKDAYEDFRRHRSDRVENNRLALVFEDHQFREKKWKHIRVGEVIKVQSNQTLPCDMVLLATSDPTGVVYVQTTNLDGESNLKTRYAKQETLLKAADMESFNGFIKCEKPNRNIYGFQANMEIDGRRLSLGPSNIILRGCELKNTAWALGVVVYAGGETKAMLNNSGAPSKRSRLETRMNLEIILLSLFLIVLCTIAAATAAVWLRTHRDDLDTILFYRRKDYSERPGGKNYKYYGWGWEIFFTFFMAVIVYQIMIPISLYISMELVRIGQAYFMTNDDQMYDESSDSSFQCRALNINEDLGQIKYLFSDKTGTLTDNKMEFQCACIEGVDYSDREPADSEHPGYSIEVDGIILKPKMRVRVDPVLLQLTKTGKATEEAKRANEFFLSLAACNTIVPIVSNTSDPNVKLVDYQGESPDEQALVYAAAAYGFLLIERTSGHIVINVRGETQRFNVLGLHEFDSDRKRMSVILGCPDMSVKLFVKGADSSMFGVMDESYGGVIHETKIQLHAYSSDGLRTLVVGMRELNDSEFEQWHSSFEAASTALIGRAGLLRKVAGNIETNLRIVGATAIEDKLQRGVPEAIESLRIAGIKVWVLTGDKQETAISIGFSSRLLTRNMRQIVINSNSLDSCRRSLEEANASIASNDESDNVALIIDGTSLIYVLDNDLEDVLFQVACKCSAILCCRVAPFQKAGIVALVKNRTSDMTLAIGDGANDVSMIQMADVGVGISGQEGRQAVMASDFAMGQFRFLVPLLLVHGHWNYQRMGYMILYNFYRNAVFVLILFWYVLFTCYTLTTAITEWSSVLYSVIYTAIPTIIIGILDKDLGRQTLLDHPQLYGVGQRAEGYSTTLFWYTMIDTIWQSAAIFFIPMFAYWGSTIDTSSLGDLWTIAAVVVVNLHLAMDVIRWNWITHAAIWGSIVAACICVIVIDVIPTLPGYWAIFQVGKTWMFWFCLLAIVVTSLLPRFAIKFLVEYYRPSDVRIAREAEKLGTFRESQPVGVEMNLIQDPPRR

SEQ ID NO: 22773 - protein, 153 aa, Triticum aestivum
  unsure (1)..(153): unsure at all Xaa locations
XTLTTAITEWSSLLYTVLYTSLPTIVVGILDKDLSKSTLLAYPKLYGSGQRNEKYNLNLFVLNMLEALWQSLVVFYIPYFAYRQSTIGMSSLGDLWALASVIVVNMQLAMDIIRWNWIIHAFVWGTIAATVICLFVIDSIWVLPGYGAIYHIX

SEQ ID NO: 22774 - protein, 403 aa, Mus musculus
MRGQVGDLSPQQQEALARFRETLQDLLPTLPKADDYFLLRWLRARNFDLKKSEDMLRKHVEFRNQQNLDQILTWQAPEVIQLYDSGGLSGYDYEGCPVWFDIIGTMDPKGLFMSASKQDMIRKRIKVCEMLLHECELQSQKLGRKIERMVMVFDMEGLSLRHLWKPAVEVYQQFFAILEANYPETVKNLIIIRAPKLFPVAFNLVKSFMGEETQKKIVILGGNWKQELVKFVSPDQLPVEFGGTMTDPDGNPKCLTKINYGGEVPKRYYLSNQERPQYEHSVVVGRGSSHQVENEILFPGCVLRWQFASDGGDIGFGVFLKTRMGERQKAGEMVEVLPSQRYNAHMVPEDGSLNCLKAGVYVLRFDNTYSLLHTKKVGYTAEVLLPDKACEEKLQGLGSVSPP

SEQ ID NO: 22775 - protein, 403 aa, Mus musculus
MSGRVGDLSPKQEEALAKFRENVQDVLPTLPNPDDYFLLRWLRARSFDLQKSEAMLRKHVEFRKQKDIDKIISWQPPEVIQQYLSGGRCGYDLDGCPVWYDIIGPLDAKGLLFSASKQDLLRTKMRDCELLLQECIQQTTKLGKKIETITMIYDCEGLGLKHLWKPAVEAYGEFLTMFEENYPETLKRLFVVKAPKLFPVAYNLIKPFLSEDTRRKIMVLGANWKEVLLKHISPDQLPVEYGGTMTDPDGNPKCKSKINYGGDIPKQYYVRDQVKQQYEHTVQVSRGSSHQVEYEILFPGCVLRWQFMSEGSDVGFGIFLKTKMGERQRAGEMTEVLPNQRYNSHMVPEDGTLTCSEPGIYVLRFDNTYSFIHAKKVSFTVEVLLPDKAAEEKMNQQGADTPK

SEQ ID NO: 22776 - protein, 716 aa, Mus musculus
MVQKYQSPVRVYKHPFELIMAAYERRFPTCPLIPMFVDSDTVSEFKSEDGALHVIERRCKLDIDAPRLLKKIAGVDYVYFVQKNSLNSRDRTLHIEAHNETFSNRVIIHEHCCYTVHPENEDWTCFEQSASLDIKSFFGFESTVEKIAMKHYTSNIKKGKEIIEYYLRQLEEEGITFVPRWTPPPVGPSETCSSSKNQVTSAAVLVPDAAAVMEGLSGENLSSPGTASEPVVGTPDDKLDADYIKRYLGDLTPLQESCLIRLRQWLQETHKGKIPKDEHILRFLRARDFNIDKAREIMCQSLTWRKQHQVDYILDTWTPPQVLLDYYAGGWHHHDKDGRPLYVLRLGQMDTKGLVRALGEEALLRYVLSINEEGLRRCEENTKVFGRPISSWTCLVDLEGLNMRHLWRPGVKALLRIIEVVEANYPETLGRLLILRAPRVFPVLWTLVSPFIDDNTRRKFLIYAGNDYQGPGGLLDYIDKEIIPDFLSGECMCDVPEGGLVPKSLYRTAEELENEDLKLWTETIYQSASVFKGAPHEILIQIVDASSVITWDFDVCKGDIVFNIYHSKRSPQPPKKDSLGAHSITSPGGNNVQLIDKVWQLGRDYSMVESPLICKEGESVQGSHVTRWPGFYILQWKFHTMPACAATNLPRVDDVLASLQVSSHKCKVMYYTEVIGSEDFRGSMTSLESSHSGFSQLSAATTSSSQSQSSSMISSE

SEQ ID NO: 22777 - protein, 719 aa, Mus musculus
MVQKYQSPVRVYKHPFELIMAAYERRFPTCPLIPMFVDSDTVSEFKSEDGALHVIERRCKLDIDAPRLLKKIAGVDYVYFVQKNSLNSRDRTLHIEAHNETFSNRVIIHEHCCYTVHPENEDWTCFEQSASLDIKSFFGFESTVEKIAMKHYTSNIKKGKEIIEYYLRQLEEEGITFVPRWTPPPVGPSETCSSSKNQVTSAAVLVPDAAAVMEGLSGENLSSPGTASEPVVGTPDDKLDADYIKRYLGDLTPLQESCLIRLRQWLQETHKGKIPKDEHILRFLRARGFNIDKAREIMCQSLTWRKQHQVDYILDTWTPPQVLLDYYAGGWHHHDKDGRPLYVLRLGQMDTKGLVRALGEEALLRYVLSINEEGLRRCEENTKVFGRPISSWTCLVDLEGLNMRHLWRPGVKALLRIIEVVEANYPETLGRLLILRAPRVFPVLWTLVSPFIDDNTRRKFLIYAGNDYQGPGGLLDYIDKEIIPDFLSGECMCDVPEGGLVPKSLYRTAEELENEDLKLWTETIYQSASVFKGAPHEILIQIVDASSVITWDFDVCKGDIVFNIYHSKRSPQPPKKDSLGAHSITSPGGNNVQLIDKVWQLGRDYSMVESPLICKEGESVQGSHVTRWPGFYILQWKFHTMPACAATNLPRVDDVLASLQVSSHKCKVMYYTEVIGSEDFRGSMTSLESSHSGFSQLSAATTSSSQSQSSSMISRWRFC

SEQ ID NO: 22778 - protein, 403 aa, Rattus norvegicus
MSGRVGDLSPKQEEALAKFRENVQDVLPALPNPDDYFLLRWLRARSFDLQKSEAMLRKHVEFRKQKDIDKIISWQPPEVIQQYLSGGRCGYDLDGCPVWYDIIGPLDAKGLLFSASKQDLLRTKMRDCELLLQECTQQTAKLGKKIETITMIYDCEGLGLKHLWKPAVEAYGEFLTMFEENYPETLKRLFVVKAPKLFPVAYNLIKPFLSEDTRKKIMVLGANWKEVLLKHISPDQLPVEYGGTMTDPDGNPKCKSKINYGGDIPKQYYVRDQVKQQYEHSVQISRGSSHQVEYEILFPGCVLRWQFMSEGSDVGFGIFLKTKMGERQRAGEMTEVLPNQRYNSHMVPEDGTLTCSEPGIYVLRFDNTYSFIHAKKVSFTVEVLLPDKAAEEKLNQQGAVTPK

SEQ ID NO: 22779 - protein, 1000 aa, Rattus norvegicus
MLLLTWAAASVSLGFRRGCPSSFQDKAYERRFPTCPLIPMFVDSDTVSEFKSEDGAIHVIERRCKLDIDAPRLLKKIAGVDYVYFVQKNSLNSRDRTLHIEAHNETFSNRVIIHEHCCYTRSLPSAHVIFSPLISEVPLSVWATTDVGEQTRELEVHPENEDWTCFEQSASLDIKSFFGFESTVEKIAMKHYTSNIKKGKEIIEYYLRQLEEEGITFVPRWTPPPTGPSSETCSSSKNQAASAAVLVPDAAAVKEGLSGEVLSSPGTVAEPVVGTPDDKLDADYIKRYLGDLTPLQESCLIRLRQWLQETHKGKIPKDEHILRFLRARDFNIDKAREIMCQSLTWRKQHQVDYILDTWTPPQVLQDYYAGGWHHHDKDGRPLYVLRLGQMDTKGLVRALGEEALLRYVLSINEEGLRRCEENTKVFGRPISSWTCLVDLEGLNMRHLWRPGVKALLRIIEVVEANYPETLGRLLILRAPRVFPVLWTLVSPFIDDNTRRKFLIYAGNDYQGPGGLLDYIDKEIIPDFLSGECMCDVPEGGLVPKSLYRTPEELENEDLKLWTETIYQSASVFKGAPHEVQLPGSFRNSVCPQELQILIQIVDAASVITWDFDVCKGDIVFNIYHSKRSPQPPKKDSLGAHSITSPGGNNVQLIDKVWQLGRDYSMVESPLICKEGESVQGSHVTRWPGFYILQWKFHTMPACAATNLPRVDDVLASLQVSSHKCKVMYYTEVIGSEDFRGSMTSLESSHSGFSQLSAATTSSSQSHSSSMISSPRGVWDSPNWEVCRARGSALSKPEMARPVEPALTSDGVKLTDVLQALTLSCGWPALPRKRNRGSGYGMDVVTLTFGGALVNPLIDALSSQSVLSSRTGQSDLLESHCPSGTPPGSPLCETSLFQFFQIVGPAIWCSSLLELFVPQPLLRMHVRPWTETHAPGHLQVPQLSLHAQPVFGPPGCGFFQWPRSRMMKSFEVSQNAHLLRKTQDIRLSSPPPPPLPRVDPG

SEQ ID NO: 22780 - protein, 400 aa, Rattus norvegicus
MSGRVGDLSPKQAETLAKFRENVQDVLPALPNPDDYFLLRWLRARNFDLQKSEAMLRKYMEFRKTMDIDHILDWQPPEVIQKYMPGGLCGYDRDGCPVWYDIIGPLDPKGLLFSVTKQDLLKTKMRDCERILHECDLQTERLGRKIETIVMIFDCEGLGLKHFWKPLVEVYQEFFGLLEENYPETLKFMLIVKATKLFPVGYNLMKPFLSEDTRRKIVVLGNSWKEGLLKLISPEELPAHFGGTLTDPDGNPKCLTKINYGGEIPKSMYVRDQVKTQYEHSVQISRGSSHQVEYEILFPGCVLRWQFSSDGADIGFGVFLKTKMGERQKAGEMTEVLTSQRYNAHMVPEDGSLTCTEAGVYVLRFDNTYSFVHAKKVSFTVEVLLPDEGMQKYDEELTPI

SEQ ID NO: 22781 - protein, 715 aa, Rattus norvegicus
MVQKYQSPVRVYKYPFELVMAGIRPQACRERPHPRKAYEKRFPTCPLIPVFLGSEVLSECRSADGAVHTVERSCRLRVDAPRLLRKIAGVEHVVFIQRNVLNWRERTLLIDAHNETFASRVTVKEHCRYTVHPENEDWTCFEQSASLDVRSFFGFESTLEKIAMKQYTANVKRGKEVIEHYLSELISQGASHIPRWTPAPVREADVRSQLVCPCPSSLETDGPSDAPAPASEMATADGDKLDADYIERCLGHLSPMQESCLVQLRRWLQETHKGKIPKDEHILRFLRARDFHLDKARDMLCQSLSWRKQHQVDLLLQTWRPPAPLQEFYAGGWHYQDIDISSLSWALPTHKDGRPLYILRLGQMDTKGLMKAVGEEALLQHVSGRVLEAKGRGRISSWTCLLDLEGLNMRHLWRPGVKALLRMIEVVEDNYPETLGRLLIVRAPRVFPVLWTLVSPFINENTRRKFLIYSGSNYQGPGGLVDYLDKDVIPDFLGGESVCNVPEGGMVPKSLYLTEEEQEQADQLRQWSETYHSASVLRGSPHEVAMEIPEGESVITWDFDILRGDVVFSLYHAKQAPKLSPQEPGVRASGQLIDKNWILGVDYSRVEAPLICREGQSIQGSHVTQWPGVYLLQWQIHSPPESVACSLPGVDDVLTALHSPGPKCKLLYYCEVLASEDFRGSMSSLESCASRFSQLSATTTSSSSGQSHSGSMVSR

SEQ ID NO: 22782 - protein, 670 aa, Anopheles gambiae str. PEST
TRVCASIQQHSVSTKATTKRAPKAMVQKYESPVRIYKYPFELVVAAYERRFPTCPQMPIVLDCEIIEDNVFDNGARRDTKRRCKIAVEAPYLIKKIIGVDVVYFIQQNFLDMKTRTLNIEATNESFATRVEIFEKCRYYAHPENPDWTCFDQTATLDIKNFFGIEHSMEKMGMKQYTQTTLKGKEIIEFFVNELKQEGITHVDRWVDDATVTSTTAGAATNTTPPEKPPLCRDNSILDADYIAKYLGQLTPLQESKLVQLRKRFEHGTSEHPEPDYQTLLRFLRARDFSIDKATGMLQESLQWRKEQRIDSILGEYKTPAVVEKYFPGGWHHHDKDGRPLYILRLGTMDVKGLLKSVGEDELLKLTLHICEEGLRLMKEATKLFGKPVWNWCLLVDLDGLSMRHLWRPGVKALLRIIETVETNYPETMGRVLIVRAPRVFPVLWTIVSTFIDENTRSKFLFFGGPDCMHAEDGIEQYIDTDKIPSFLGGSCNTLIHEGGLVPKHLYKSESIEETNGALQAHDHHGLYKAVDLKPGQLFELLIRNTDPKSVLTWDFEVLKNDTLFAVFHTEKEIEQSGNDDFSSVFDGPDFKEGTNYKKIEQSVKCRPKEGVQGSHEMASTGTYVLQWMCPPSCDGPAQLMYFHEILSSANYKGSMTSLQSGFSSNSLQSR

SEQ ID NO: 22783 - protein, 349 aa, Anopheles gambiae str. PEST
KQQQLEEKMSSNDSTPLNSPRKIFGKTATLDNNAMLEYEMNKNLDVKFREKADKELGETGGELTYTKIRQLRQQLNIYNENHQRALGCRRDDSFLLRFLRAKKFDVEKAFKMMQKYYKMKEEYPEIFKVSPPSEMKFMLEMQIQTMLPKKDEHGRQIYLFRVEKCDPYKIPVDYVFRSNVLALEDAVRSPETQIGGLVVLLDMAGLGFAHARYLSPHLAKKTVEVVQEAFPLRFKAFHVLHEPFYFDAILAVLKPFLKDKIRRRIHLHGSSLSSLHKYVSKDLLPAEYGGNLGPFDNTEWRQTILDNEQYFIDLETYNHLSESCYQLGGDGDAESIDSLQFGDTETEDS

SEQ ID NO: 22784 - protein, 349 aa, Anopheles gambiae str. PEST
KQQQREEKMSSNDSTPLNSPRKIFGKTATLDNNAMLEYEMNKNLDVKFREKADKELGETGGELTYTKIRQLRQQLNIYNENHQRALGCRRDDSFLLRFLRAKKFDVEKAFKMMQKYYKMKEEYPEIFKVSPPSEMKFMLEMQIQTMLPKKDEHGRQIYLFRVEKCDPYKIPVDYVFRSNVLALEDAVRSPETQIGGLVVLLDMAGLGFAHARYLSPHLAKKTVEVVQEAFPLRFKAFHVLHEPFYFDAILAVLKPFLKDKIRRRIHLHGSSLSSLHKYVSKDLLPAEYGGNLGPFDNTEWRQTILDNEQYFIDLETYNHLSESCYQLGGDGDAESIDSLQFGDTETEDS

SEQ ID NO: 22785 - protein, 301 aa, Kluyveromyces lactis
MVSEQEILESYPQVCPSGSLSGTPGNLDSEQEAKLKEFRELLESLGTKERLDDSTLLRFLRARKFDLEASKIMYENCEKWRKEFGVDTIFEDFHYEENTLVAKYYPQYYHKTDNDGRPVYIEELGSVNLTQMYKITTQERMLKNLVWEYEAFVRYRLPACSRKAGYLVETSCTILDLKGISISSAAQVLSYVREASNIGQNYYPERMGKFYLINAPFGFSTAFRLTKPFLDPVTVSKIFILGSSYQKDLLKQIPAENLPKKFGGQSEVSEAEGGLYLSDIGPWREEEYIGPEGEAPKAFQL

SEQ ID NO: 22786 - protein, 550 aa, Lotus japonicus
MSGPLSPKTALDKSDRAGSLKKKAMSLRSSLSRKSRRSSSKVMSVEIEDVRDAEDLKAVDEFRQALILDELLPEKHDDYHQLLRFLKARKFDIEKSKQMWSDMLQWRKEFGADTIVEDFDFKEIDEVVKYYPHGHHGVDKDGRPVYIENIGQVDATKLMQVTTMDRYIKYHVKEFERTFDLKFAACSIAAKKHIDQSTTILDVQGVGLKNFNKHARELITRLQKIDGDNYPETLNRMFIINAGSGFRMLWSTVKSFLDPKTTSKIHVLGNKYQSKLLEVIDASQLPEFLGGTCTCADQGGCMRSDKGPWKDPELVRMVQNGEHKCSRKCESPVVEEKKISEETTKMGANFTSQLSSVFGEVPATKVCNYEDFVPAADETVWKKVEENEQFQMSKAVVETFSMVDSCKIHEKVNSQIFTGVMAFVMGIVTMVRMTRNMPKKLTDANFYSNSVYSGGQNPSDQTNPSISAQEFMTVMKRMAELEEKMGNMNYNTCMPPEKEEMLNAAISRADALEQELMSTKKALEDSLAKQEELSAYIEKKKKKKKLFAWA

SEQ ID NO: 22787 - protein, 482 aa, Lotus japonicus
MSELLSSGTDSFKKKAINASNMLRNSLTRKGRRSSKVMSVEIEDVHDAEELKAVEEFRQALISDDLLPAKHDDYHMMLRFLKARKFEIDKSKQMWSDMLKWRKEFGADTIVEEFEFKEIDEVLKYYPQGHHGVDKEGRPVYIEQLGQVDATKLMQVTTMDRYIKYHVKEFEKTFDLKFAACSIAAKKHIDQSTTILDVQGVGLKSFNKHARELVTRIQKVDGDNYPETLNRMFIINAGSGFRILWNTVKSFLDPKTTAKINVLGNKYDTKLLEIIDASELPEFLGGTCTCTDQGGCMRSDKGPWKDEEILRMVQNGAHKCSRKPESHGEEEKPISEDKTSKFDENLTPQVSPVCDQVPAAKLSKNVDVIPVAIPVGVPVAVPAADKNASKKVGQNDTTSKEFTTVMKRMAELEEKMTTMNHQPATMPPEKEEMLNATISRADVLEKQLMDTKKALEDSLAKQEVLSAYVEKKKQKKKTFFCC

SEQ ID NO: 22788 - protein, 625 aa, Lotus japonicus
MSGPLDFFARPCFEGFSGSDEKRERRSDFENSEDERRTRIGSLKKKALSASTKFKHSLRKKSSRRKSDGRVSSVSIEDVRDVEELQAVDAFRQSLIMDELLPQAFDDYHMMLRFLKARKFDIEKAKHMWAEMLQWRKEFGADTIMQDFEFQELDEVVRYYPHGHHGVDKEGRPVYIERLGKVDPNKLMQVTTMDRYVRYHVQEFEKSFAIKFPACTIAAKRHIDSSTTILDVQGVGLKNFTKSARELITRLQKVDGDNYPETLCQMFIINAGPGFRLLWNTVKSFLDPKTTSKIHVLGNKYHSKLLEVIDASELPEFLGGACTCEDQGGCLRSDKGPWKNPEILKMVLNGEPRRARQVVKVLNSEGKVIAYAKPRYPTVKGSDTSTAESGSEAEDIASPKAMKNYSHLRLTPVREEAKIVGKSSYTNNFSGYDEYVPMVDKPVDAVLKKQASLQRSYTSQGAPSRPATQRTPEGIQARILVAITAFLLTIFTIFRQVACRVTKKLPAISSNHDQSTSEPTFDTTVVEVIPSSSTPAHTEENLLPSMLKRLGELEEKVDTLQSKPSEMPYEKEELLNAAVCRVDALEAELIATKKALYEALMRQEELLAYIDRQAEAKLRKKRFCW

SEQ ID NO: 22789 - protein, 247 aa, Gossypium hirsutum
MMMSSNNMECSAKAREEEEITKISLMRSLVETQDPSSKEVDDMTIRRFLRARELDVEKASSMFLKYLKWRRSFVPNGFISPSELTHEIQQNKMFLQGSDNKGRPISVLLAARHFQHNGGLDEFKRFILYIFDKILARMPPGQDKFIVIGDLDGWGYANCDIRAYLAALSLLQDYYPERLGKMFIVHAPYVFMAAWKIVHPFIDVKTRKKIVFVENKSLKSTLLEEIDESQLPEMYGGTLPLIPIQDS

SEQ ID NO: 22790 - protein, 560 aa, Arabidopsis thaliana
MAETKPEIEMSEEERKIVKISSLKKKAINASNRFKNSFKKKGRRSSSRVMSVPIEDDIDAEDLQALDAFRQALILDELLPSKLDDLHMMLRFLRARKFDIEKAKQMWSDMIQWRKDFGADTIIEDFDFEEIDEVMKHYPQGYHGVDKEGRPVYIERLGQIDANKLLQVTTMDRYVKYHVKEFEKTFKVKFPSCSVAANKHIDQSTTILDVQGVGLKNFSKSARELLQRLCKIDNENYPETLNRMFIINAGSGFRLLWSTVKSFLDPKTTAKIHVLGNKYHSKLLEVIDASELPEFFGGACTCEDKGGCMRSDKGPWNDPEVLKIAINREAKCSPISEDEHKHVDQGRSTSGFESLERIKKKTDEDNVYEKQIATIDKSMDMAWLAKTQKAENFPISKGITKLMKGAPKKGDGLLVGGVMAFVMGIVAMVRLSKDVPRKLTEAALYGNSVCYEESTKSKQNQGQFAAPVSSSEYMLMVKRMAELEDKCMFLDLKPAHVESEKEEKLQAALNRVQVLEQELTETKKALEEALVSQKEILAYIEKKKKKKKLVRTKHSHTSVI

SEQ ID NO: 22791 - protein, 550 aa, Arabidopsis thaliana
MADTMVAHMDRHNKIDVEISEDDKRLTKLCSLKKKAINATNKFKHSMTKKGRRHSRVACVSIVDEIDTEELQAVDAFRQALILDELLPSKHDDHHMMLRFLRARKFDLEKAKQMWSDMLNWRKEYGADTIMEDFDFKEIEEVVKYYPQGYHGVDKEGRPIYIERLGQVDATKLMKVTTIDRYVKYHVKEFEKTFNVKFPACSIAAKRHIDQSTTILDVQGVGLSNFNKAAKDLLQSIQKIDNDNYPETLNRMFIINAGCGFRLLWNTVKSFLDPKTTAKIHVLGNKYQTKLLEIIDANELPEFLGGKCTCADKGGCMRSDKGPWNDPEIFKLVQNGEGRCLRRSLSGIEEKTIFEYNNETKKKCEPEETHKQSAAEMEKKFIDTNVDAAAAADWPTKLNKAEKNPTDLKDVYSAVNPLERKGYLYGSVMALLMGIVGVMRLTKNMPRRLTEANVYSREGSAVYQDGVTVMSKQEYIAMVKKITDLEEKCKSMEAQAAFYMEREKTLDAALRRIDQLELQLSETNKVKLFFSLASLLLCLLCFVIALFSKT

SEQ ID NO: 22792 - protein, 371 aa, Arabidopsis thaliana
MTDTMSAHMDRHNKLDYDGSEDEKKTKLCSLKKKAINASNKFKHSFTKRTRRNSRVMSVSIVDDIDLEELQAVDAFRQALILDELLPSKHDDHHMMLRFLRARKFDLEKAKQMWTDMIHWRKEFGVDTIMEDFDFKEIDEVLKYYPQGYHGVDKDGRPVYIERLGQVDATKLMQVTTIDRYVKYHVREFEKTFNIKLPACSIAAKKHIDQSTTILDVQGVGLKSFSKAARDLLQRIQKIDSDNYPETLNRMFIINAGSGFRLLWSTVKSFLDPKTTAKIHVLGNKYQSKLLEIIDSNELPEFLGGNCTCADKGGCMRSDKGPWNDPDIFKMVQNGEGKCPRKTLSNIEEKTISVDENTTMVKAKYKNIFDL

SEQ ID NO: 22793 - protein, 548 aa, Arabidopsis thaliana
MTDTMSAHMDRHNKLDYDGSEDEKKTKLCSLKKKAINASNKFKHSFTKRTRRNSRVMSVSIVDDIDLEELQAVDAFRQALILDELLPSKHDDHHMMLRFLRARKFDLEKAKQMWTDMIHWRKEFGVDTIMEDFDFKEIDEVLKYYPQGYHGVDKDGRPVYIERLGQVDATKLMQVTTIDRYVKYHVREFEKTFNIKLPACSIAAKKHIDQSTTILDVQGVGLKSFSKAARDLLQRIQKIDSDNYPETLNRMFIINAGSGFRLLWSTVKSFLDPKTTAKIHVLGNKYQSKLLEIIDSNELPEFLGGNCTCADKGGCMRSDKGPWNDPDIFKMVQNGEGKCPRKTLSNIEEKTISVDENTTMKSDSFAKNKFDAENTKFIPMIDKTVNASTWPTNLHKSNYPEPEDLYSAVKPSQRRGGEGYLFGGVMSLVMGLMTVVRLTKNMPRKLTEAAIYGGEVDKAETTMVSNQEYMSMVKRMAELEEKCRSLDNQPAAFSPEKEQILTAALSRVDELELQLAQTKKTLEETMATQHVIMAYIDKKKKKKKFFGF

SEQ ID NO: 22794 - protein, 608 aa, Arabidopsis thaliana
MSGPLDRFTSPCFSNNGEKREKKSDFEVSEDEKKTRIGGILKKKSSKSKFRHSLKRRGSRSIDRTLSLTFEDIHDAEELRYVSEFRQSLISDHLLPPNLDDYHIMLRFLFARKFDLGKAKLMWTNMIQWRRDFGTDTILEDFEFPELDEVLRYYPQGYHGVDKEGRPVYIERLGKVDASKLMQVTTLERYLRYHVKEFEKTITVKFPACCIAAKRHIDSSTTILDVQGLGLKNFTKTARDLIIQLQKIDSDNYPETLHRMFIINAGSGFKLLWGTVKSFLDPKTVSKIHVLGNKYQNKLLEMIDASQLPDFFGGTCTCADQGGCMRSDKGPWKDSEILKMGRSGGTFCRHAGAFLTSDSQISSSDKPTYSLKVSDTSTAKSGSELEEMASPKTNTNNHVPKLTPVSEYANGNISPTVLSEYEECVPMVDKVVDVAWQLQEMPNASEGPQYTSSLGKIGSVRHIWSWLTAFFISFFTLLASLALPQTKEHSQLHSSSVRAELCDERIARESRPPSPPRSTITERVIISSVLSRLGDLEKQIENLHSRKSEMPHEKEELLNAAVYRVDALEAELITTKKALHEALIRQEELLGYIDRQKEAKCRRKKFCW

SEQ ID NO: 22795 - protein, 608 aa, Arabidopsis thaliana
MSGPLDRFTSPCFSNNGEKREKKSDFEVSEDEKKTRIGGILKKKSSKSKFRHSLKRRGSRSIDRTLSLTFEDIHDAEELRYVSEFRQSLISDHLLPPNLDDYHIMLRFLFARKFDLGKAKLMWTNMIQWRRDFGTDTILEDFEFPELDEVLRYYPQGYHGVDKEGRPVYIERLGKVDASKLMQVTTLERYLRYHVKEFEKTITVKFPACCIAAKRHIDSSTTILDVQGLGLKNFTKTARDLIIQLQKIDSDNYPETLHRMFIINAGSGFKLLWGTVKSFLDPKTVSKIHVLGNKYQNKLLEMIDASQLPDFFGGTCTCADQGGCMRSDKGPWKDSEILKMGRSGGTFCRHAGAFLSSDSQISSSDKPTYSLKVSDTSTAKSGSELEEMASPKTNTNNHVPKLTPVSEYANGNISPTVLSEYEECVPMVDKVVDVAWQLQEMPNASEGPQYTSSLGKIGSVRHIWSWLTAFFISFFTLLASLALPQTKEHSQLHSSSVRAELCDERIARESRPPSPPRSTITERVIISSVLSRLGDLEKQIENLHSRKSEMPHEKEELLNAAVYRVDALEAELITTKKALHEALIRQEELLGYIDRQKEAKCRRKKFCW

SEQ ID NO: 22796 - protein, 543 aa, Arabidopsis thaliana
MTLIQDAELKPRMGSFKKRSSSKNLRYSMTKRRRSSKVMSVEIIEDVHDAEELKAVDAFRQSLILDELLPEKHDDYHMMLRFLKARKFDLEKTKQMWTEMLRWRKEFGADTVMEEFDFKEIDEVLKYYPQGHHGVDKEGRPVYIERLGLVDSTKLMQVTTMDRYVNYHVMEFERTFNVKFPACSIAAKKHIDQSTTILDVQGVGLKNFNKAARDLITRLQKVDGDNYPETLNRMFIINAGSGFRMLWNTVKSFLDPKTTAKIHVLGNKYQSKLLEIIDESELPEFLGGSCTCADNGGCMRSDKGPWKNPEIMKRVHNGDHKCSKGSQAENSGEKTIPEEDDSTTEPASEEEKASKEVEIVPAAHPAWNMPEAHKFSLSKKEVYAIQEACNNATTEGGRSPIFTGVMALVMGVVTMIKVTKNVPRKLTESTLYSSPVYCDDASMNKSAMQSEKMTVPAISGEDFMAIMKRMAELEQKVTVLSAQPTVMPPDKEEMLNAAISRSNVLEQELAATKKALDDSLGRQEELVAYIEKKKKKKKLFNYW

SEQ ID NO: 22797 - protein, 612 aa, Arabidopsis thaliana
MSGSLDRFARPCFEGVSSNDERRERRSDFEVSEDEKKTRIGNFNFKKKAAKASSKLRHSLKKKGSSRRRSSDRTFSLTIEDIHDVEELRAVDEFRNLLVSENLLPPTLDDYHIMLRFLKARKFDIGKTKLMWSNMIKWRKDFGTDTIFEDFEFEEFDEVLKYYPHGYHGVDKEGRPVYIERLGLVDPAKLMQVTTVERFIRYHVREFEKTVNIKLPACCIAAKRHIDSSTTILDVQGVGFKNFSKPARDLIIQLQKIDNDNYPETLHRMFIINGGSGFKLVWATVKQFLDPKTVTKIHVIGNKYQNKLLEIIDASQLPDFLGGTCTCADRGGCMRSDKGPWNDPEILKMLQSGGPLCRHNSALNSFSRVSSCDKPSFSGIKASDTSTAESGSEVEEMASPKVNRELRVPKLTPVCEDIRGTAISYPTDSSEYDSPMVDKVVDVAWMAHEKPKASKGSEDTPDSGKIRTVTYIWRWLMMFFVNLFTLLISLALPQREGHSQSESSVDGPNARESRPPSPAFATIAERNVFSSVVNRLGDLEKQVETLHSKRHEMPREKEELLNTAVYRVDALEAELIATKKALHEALMRQDDLLAYIDREEDEKYHKKKKVCW

SEQ ID NO: 22798 - protein, 614 aa, Arabidopsis thaliana
MSGPVDRFAIPCFEGILSSDEKKERKSDFENSEDERRTRIGSLKKKAINASTKFKHSLKKKRRKSDVRVSSVSIEDVRDVEELQAVDEFRQALVMEELLPHKHDDYHMMLRFLKARKFDIEKAKHMWADMIQWRKEFGTDTIIQDFQFEEIDEVLKYYPHGYHSVDKEGRPVYIERLGKVDPNKLMQVTTLDRYIRYHVKEFERSFMLKFPACTIAAKKYIDSSTTILDVQGVGLKNFTKSARELITRLQKIDGDNYPETLHQMFIINAGPGFRLLWSTVKSFLDPKTTSKIHVLGCKYQSKLLEIIDSSELPEFLGGACTCADQGGCMLSDKGPWKNPEIVKMVLHGGAHRAKQVVKVLNSDGKVIAYAKPSYPWIKGSDTSTAESGSEAEDIVVSPKAVKSYSHLRLTPVREEAKVGSGETSFAGSFAGYDEYVPMVDKAVDATWKVKPTAINRAPSKGAHMPPNVPKDHESFSARVLVTFMAFVMAILTFFRTVSNRVVTKQLPPPPSQPQIEGSAAAEEADLLNSVLKKLTELEEKIGALQSKPSEMPYEKEELLNAAVCRVDALEAELIATKKALYEALMRQEELLAYIDRQEAAQHQKKNKRKQMFCF

SEQ ID NO: 22799 - protein, 583 aa, Arabidopsis thaliana
MSGPVDRFAIPCFEGILSSDEKKERKSDFENSEDERRTRIGSLKKKAINASTKFKHSLKKKRRKSDVRVSSVSIEDVRDVEELQAVDEFRQALVMEELLPHKHDDYHMMLRFLKARKFDIEKAKHMWADMIQWRKEFGTDTIIQDFQFEEIDEVLKYYPHGYHSVDKEGRPVYIERLGKVDPNKLMQVTTLDRYIRYHVKEFERSFMLKFPACTIAAKKYIDSSTTILDVQGVGLKNFTKSARELITRLQKIDGDNYPETLHQMFIINAGPGFRLLWSTVKSFLDPKTTSKIHVLGCKYQSKLLEIIDSSELPEFLGGACTCADQGGCMLSDKGPWKNPEIVKMVLHGGAHRAKHVVKVLNSDGKVIAYAKPSYPWIKGSDTSTAESGSEAEDIVVSPKAVKSYSHLRLTPVREEAKVGSGETSFAGSFAGYDEYVPMVDKAVDATWKVKPTAINRAPSKGAHMPPNVPKDHESFSARVLVTFMAFVMAILTFFRTVSNRVVTKQLPPPPSQPQIEGSAAAEEADLLNSVLKKLTELEEKIGALQSKPSEMPYEKEELLNAAVCRVDALEAELIATKKALYKL

SEQ ID NO: 22800 - protein, 558 aa, Arabidopsis thaliana
MSLNVDLDVCVLERPNVCSFKKRSCSKLSCSLTKKRRSSKVMSVEIFEDEHDAEELKVVDAFRQVLILDELLPDKHDDYHMMLRFLKARKFDLEKTNQMWSDMLRWRKEFGADTVMEDFEFKEIDEVLKYYPQGHHGVDKEGRPVYIERLGQVDSTKLMQVTTMDRYVNYHVMEFERTFNVKFPACSIAAKKHIDQSTTILDVQGVGLKNFNKAARDLITRLQKVDGDNYPETLNRMFIINAGSGFRMLWNTVKSFLDPKTTAKIHVLGNKYQSKLLEIIDASELPEFLGGSCTCADNGGCMRSDKGPWNNPDIMKRVNNGDHICSKRSQADNAGENIISQGNNSAVEEAPETDQSQPSPCQNVVVAHPAWNIPEAHKFSLSKRDVYAIQEACKATNESGRSPIFTGVMAFVMGVVTMIRVTKNVPRKLTESTIYSSPVYCDENSMNKSSMHGKKMATTTISGEDFMAVMKRMAELEQKVTNLSAQPATMPPEKEEMLNAAISRADFLEQELAATKKALDDSLTRQEDLVAYVERKKKKKKLVRFQINAYLTNFCFGV

SEQ ID NO: 22801 - protein, 558 aa, Arabidopsis thaliana
MKRFFSSLFCYLLVLDVVLCLDAELKPRMGSFKKRSSSKNLRYSMTKRRRSSKVMSVEIIEDVHDAEELKAVDAFRQSLILDELLPEKHDDYHMMLRFLKARKFDLEKTKQMWTEMLRWRKEFGADTVMEFDFKEIDEVLKYYPQGHHGVDKEGRPVYIERLGLVDSTKLMQVTTMDRYVNYHVMEFERTFNVKFPACSIAAKKHIDQSTTILDVQGVGLKNFNKAARDLITRLQKVDGDNYPETLNRMFIINAGSGFRMLWNTVKSFLDPKTTAKIHVLGNKYQSKLLEIIDESELPEFLGGSCTCADNGGCMRSDKGPWKNPEIMKRVHNGDHKCSKGSQAENSGEKTIPEEDDSTTEPASEEEKASKEVEIVPAAHPAWNMPEAHKFSLSKKEVYAIQEACNNATTEGGRSPIFTGVMALVMGVVTMIKVTKNVPRKLTESTLYSSPVYCDDASMNKSAMQSEKMTVPAISGEDFMAIMKRMAELEQKVTVLSAQPTVMPPDKEEMLNAAISRSNVLEQELAATKKALDDSLGRQEELVAYIEKKKKKKKLFNYW

SEQ ID NO: 22802 - protein, 547 aa, Arabidopsis thaliana
MADTKQDMENSEDGRKLVKMSSLKQKAISASNRFKNSFKKKTRRTSSKIVSVANTDDINGDDYLSVEAFRQVLVLDDLLPPKHDDLHMMLRFLRARKFDKEKAKQMWSDMLQWRMDFGVDTIIEDFEFEEIDQVLKHYPQGYHGVDKEGRPVYIERLGQIDANKLLQATTMDRYEKYHVKEFEKMFKIKFPSCSAAAKKHIDQSTTIFDVQGVGLKNFNKSARELLQRLLKIDNDNYPETLNRMFIINAGPGFRLLWAPIKKFLDPKTTSKIHVLGNKYQPKLLEAIDASELPYFFGGLCTCADKGGCLRSDKGPWNDPELLKIARNPEARFSTISEEDYLLVEEGTSMSMVFEPLERNKMKTIEENVSEKHIDAVDKFMALSLPPKPHLKTLRKGKEPQKKDDSFLVGGVIAFVMGIVAMLRLSKAVPRKLTDVALLTNSVYYEEAKMSKPNQDEVSAPPVSSSEYVIMVKRMAELEEKYKSLDSKSADEALEKDDKLQAALNRVQVLEHELSETKKALDETMVNQQGILAYIEKKNKKKRMFFRF

SEQ ID NO: 22803 - protein, 627 aa, Arabidopsis thaliana
MFAFIVVALGEILLVPETDKGKSKDYIEVSEDEKITRTRSRSLKKKAIKASNKLTHSLRKRGKRVADQYAPIVIEDVRDEEEEKAVNVFRKALVSLDLLPPRHDDYHTMLRFLKARRFDLEKTVQMWEEMLKWRKENGVDTIIQDFVYDEYEEVQQYYPHGYHGVDREGRPVYIERLGKIDPGKLMKVTTLERFLRYHVQGFEKTFSEKFPACSIAAKRHINSSTTIIDVHGVSWMSFRKLAQDLVMRMQKIDGDNYPETLNQMYIINAGNGFKLVWNTVKGFLDPKTTSKIHVLGNKYRSHLLEIIDPSELPEFLGGNCKCAHEGGCMRFNKGPWNDPEIMKLVRSRDAMYKPKEMGLLENGEVAKLFSLRHVNTDMSSPDGGHVRERESHPEHDKRAQLSNQAEAVGVGRMEQSDSTSPLPNNLAVERSLTTSLQKVASFLARFILQLLGSLCLMFRILGRLVNKQPENQLRPELSVSVSQQQVPPPQVHPCWLRLQNLETMVTVLCDKPSSIPQEKEDILRDSLDRIKSIEQDLQKTKKALFLTASKQIELAECFENLKESSSTNKFIFGSHIRSLHSYYFTHLTILQMVYIYKGKMVTGSEIEEEKAYKLFSSKQAVFMYQFL

SEQ ID NO: 22804 - protein, 582 aa, Arabidopsis thaliana
MCGLDMENSEDGRKLVKMSSLKQKAISASNRFKNSFKKKTRRTSSKIVSVANTDDINGDDYLSVEAFRQVLVLDDLLPPKHDDLHMMLRFLRARKFDKEKAKQMWSDMLQWRMDFGVDTIIEDFEFEEIDQVLKHYPQGYHGVDKEGRPVYIERLGQIDANKLLQATTMDRYEKYHVKEFEKMFKIKFPSCSAAAKKHIDQSTTIFDVQGVGLKNFNKSARELLQRLLKIDNDNYPETLNRMFIINAGPGFRLLWAPIKKFLDPKTTSKIHVLGNKYQPKLLEAIDASELPYFFGGLCTCADKGGCLRSDKGPWNDPELLKIARNPEARFSTISEEDYLLVEEGTSMSMVFEPLERNKMKTIEENVSEKHIDAVDKFMALSLPPKPHLKTLRKVCRYMYCSKIPICLRLLHCYVGKEPQKKDDSFLVGGVIAFVMGIVAMLRLSKAVPRKLTDVALLTNSVYYEEAKMSKPNQDEVSAPPVSSSEYVIMVKRMAELEEKYKSLDSKSADEALEKDDKLQAALNRVQVLEHELSETKKALDETMVNQQGILAYIEKKNKKKRMVRQIIKRASIVNTTFLSTYF

SEQ ID NO: 22805 - protein, 535 aa, Arabidopsis thaliana
MFAFIVVALGEILLVPETDKGKSKDYIEVSEDEKITRTRSRSLKKKAIKASNKLTHSLRKRGKRVADQYAPIVIEDVRDEEEEKAVNVFRKALVSLDLLPPRHDDYHTMLRFLKARRFDLEKTVQMWEEMLKWRKENGVDTIIQDFVYDEYEEVQQYYPHGYHGVDREGRPVYIERLGKIDPGKLMKVTTLERFLRYHVQGFEKTFSEKFPACSIAAKRHINSSTTIIDVHGVSWMSFRKLAQDLVMRMQKIDGDNYPETLNQMYIINAGNGFKLVWNTVKGFLDPKTTSKIHVLGNKYRSHLLEIIDPSELPEFLGGNCKCAHEGGCMRFNKGPWNDPEIMKHVNTDMSSPDGGHVRERESHPEHDKRAQLSNQAEAVGVGRMEQSDSTSPLPNNLAVERSLTTSLQKVASFLARFILQLLGSLCLMFRILGRLVNKQPENQLRPELSVSVSQQQVPPPQVHPCWLRLQNLETMVTVLCDKPSSIPQEKEDILRDSLDRIKSIEQDLQKTKKVNYRHSLICFNIYISLQVFDVS

SEQ ID NO: 22806 - protein, 530 aa, Arabidopsis thaliana
MLRFLKARKFDIGKTKLMWSNMIKWRKDFGTDTIFEDFEFEEFDEVLKYYPHGYHGVDKEGRPVYIERLGLVDPAKLMQVTTVERFIRYHVREFEKTVNIKLPACCIAAKRHIDSSTTILDVQGVGFKNFSKPARDLIIQLQKIDNDNYPETLHRMFIINGGSGFKLVWATVKQFLDPKTVTKIHVIGNKYQNKLLEIIDASQLPDFLGGTCTCADRGGCMRSDKGPWNDPEILKMLQSGGPLCRHNSALNSFSRVSSCDKPSFSGIKASDTSTAESGSEVEEMASPKVNRELRVPKLTPVCEDIRGTAISYPTDSSEYDSPMVDKVVDVAWMAHEKPKASKGSEDTPDSGKIRTVTYIWRWLMMFFVNLFTLLISLALPQREGHSQSESSVDGPNARESRPPSPAFATIAERNVFSSVVNRLGDLEKQVETLHSKRHEMPREKEELLNTAVYRVDALEAELIATKKALHEALMRQDDLLAYIDREEDEKEYTYVVFVGKTEKEGVLVKTEERESFELYELQEVVLYSAL

SEQ ID NO: 22807 - protein, 531 aa, Arabidopsis thaliana
MDELLPDRHDDYHMMLRFLKARKFDVEKAKQMWADMIQWRKEFGTDTIIQDFDFEEINEVLKHYPQCYHGVDKEGRPIYIERLGKVDPNRLMQVTSMDRYVRYHVKEFERSFMIKFPSCTISAKRHIDSSTTILDVQGVGLKNFNKSARDLITRLQKIDGDNYPETLHQMFIINAGPGFRLLWNTVKSFLDPKTSAKIHVLGYKYLSKLLEVIDVNELPEFLGGACTCADQGGCMLSDKGPWKNPEIVKMVLHGGAHRARQVVKVLNSEGKVIAYAKPSYTWIKGSDTSTAESGSDAEDIGSPKAIKSFSHLRLTPVPGETSLAGSFPGYDEYVPMVDKAVDATWKVKPAIQRVASRGALMSPTVPKDHEGIKARVLVMFMAFLMAVFTFFRTVTKKLPATTTSSPAETQGNAIELGSNGEGVKEECRPPSPVPDLTETDLLNCVTKKLTELEGKIGTLQSKPNEMPYEKEELLNAAVCRVDALEAELIATKKALYEALMRQEELLAYIDRQEEAQFQKMKKKKKKHLFCF

SEQ ID NO: 22808 - protein, 403 aa, Arabidopsis thaliana
MQETDRDIHISDGTMNKEEQSPNNEEMVEAFRNLLLLHGHLPDKHGDHNTLRRFLKMRDFDLEKSKEAFLNYMKWRVDYKVDLISQKFKFEEYGEVKKHYPHGFHKVDKTGRPIYIERLGMTDLNAFLKATTIERYVNYHIKEQEKTMSLRYPACSIASDKHVSSTTTILDVSGVGMSNFSKPARSLFMEIQKIDSNYYPETLHRLFVVNASSGFRMLWLALKTFLDARTLAKVQVLGPNYLGELLEAIEPSNLPTFLGGNCTCSDHGGCLFSDEGPWNDPGIKEKIEEPSTIEDAHSETMDKVSENAPANQKVHKDSVNEIDLLNSILKLIQIYINGMQESLGEVMITMEKYAALKTAVKDSQKRIEMLEISLHETKKVLNGLAEIIEAIQPNQPITKCKPV

SEQ ID NO: 22809 - protein, 648 aa, Arabidopsis thaliana
MSGKFRCLIRFSHLLRLCSLLRLCFFSIEGVEEISTLDEFRERRSDFEISEDERRRSKIGNLKKKAINASTKFTHSLKKRGKRKIDYRVPAVSIEDVRDEKEESVVLEFRRKLLERDLLPPRHDEYHTLLRFLKARDLNIEKTTQLWEEMLRWRKEYGTDTILEDFDFEELEEVLQYYPQGYHGVDKEGRPVYIERLGKAHPSKLMRITTIDRYLKYHVQEFERALQEKFPACSIAAKRRICSTTTILDVQGLGIKNFTPTAANLVAAMSKIDNSYYPETLHRMYIVNAGTGFKKMLWPAAQKFLDAKTIAKIHVLEPKSLFKLHEVIDSSQLPEFLGGSCSCFGDGGGCLRSNKGPWNDPEIMKLIYHGESSLFRQSTRKLTDPHYSSSYISIHPSKAIQAETSAAESISCSDVPSSPTGRLCSASSHVNSAYEEARASDVNGYYSCDDKFAIPDKATNRKGQERQSQYQMRELNATTIGLKCETSSPGAPIIRWLHDLRVMIDKIKCENLAKRLLSLMLKLAAVFRYTPLELLRSQTTVSPSSLTEDDSRCSLISPPPREPTMKDRILPCLERIQKLEKSYEDIRNKPVAIPVEKERMLMDSLDRIKSVEFDLDKTKRLLHATVMKQMEITEMLQNIRDSQLHVRT

SEQ ID NO: 22810 - protein, 457 aa, Arabidopsis thaliana
MWTNMIQWRRDFGTDTILEDFEFPELDEVLRYYPQGYHGVDKEGRPVYIERLGKVDASKLMQVTTLERYLRYHVKEFEKTITVKFPACCIAAKRHIDSSTTILDVQGLGLKNFTKTARDLIIQLQKIDSDNYPETLHRMFIINAGSGFKLLWGTVKSFLDPKTVSKIHVLGNKYQNKLLEMIDASQLPDFFGGTCTCADQGGCMRSDKGPWKDSEILKMGRSGGTFCRHAGAFLSSDSQISSSDKPTYSLKVSDTSTAKSGSELEEMASPKTNTNNHVPKLTPVSEYANGNISPTVLSEYEECVPMVDKVVDVAWQLQEMPNASEGPQYTSSLGKIGSVRHIWSWLTAFFISFFTLLASLALPQTKEHSQLHSSSVRAELCDERIARESRPPSPPRSTITERVIISSVLSRLGDLEKQIENLHSRKSEMPHEKEELLNAAVYRVDALEAELITTKKV

SEQ ID NO: 22811 - protein, 592 aa, Arabidopsis thaliana
MIVKLASFLMYMEYIATGREQTGEKLSDSEYIEEEPRRSRIGNLKKKAFSCSTKLTHPLKMRKGKRKIDFQIPLIEDVRDEKEEKLVSKLRQQLLQKDLLPPVHDDYHMLLRFLKTMEFKIEKTVTAWEEMLKWRKEFGTDRIIQDFNFKELDEVTRHYPQGYHGVDKDGRPIYIERLGKAHPGKLMEVTTIERYLKYHVQEFERTLQEKLPACSVAAKRRVTTTTTILDVEGLGMKNFTPTAANLLATIAKVDCNYYPETLHRMFIVNAGIGFRSFLWPAAQKLLDPMTIAKIQVLEPRSLSKLLEAIDSSQLPEFLGGLCKCPNEGGCLRSNKGPWNDPEIVELVHHMEVNNVPQTTTAPLHVRDYDSTTCTISPKETLKEEPEPEEYYSSTGSRSSMHTCIVPPLSDKASTSDGDKFITTVESIESAQSQLLDADTENTFANTSVREGGQILRFGALREKINSENIFHLVKILLVFPLKLFVLFGFLLPGYWQRQNTVVVPDSSTNNKVLECFDRLKKMEKEFTEISRKQVKIPEANEKLLAESLERIKSLELDLDKTKSVLHITLTKQLQITEQLESQDEEVSPLTLG

SEQ ID NO: 22812 - protein, 617 aa, Arabidopsis thaliana
MSGPVDRFAIPCFEGILSSDEKKERKSDFENSEDERRTRIGSLKKKAINASTKFKHSLKKKRRKSDVRVSSVSIEDVRDVEELQAVDEFRQALVMEELLPHKHDDYHMMLRFLKARKFDIEKAKHMWADMIQWRKEFGTDTIIQDFQFEEIDEVLKYYPHGYHSVDKEGRPVYIERLGKVDPNKLMQVTTLDRYIRYHVKEFERSFMLKFPACTIAAKKYIDSSTTILDVQGVGLKNFTKSARELITRLQKIDGDNYPETLHQMFIINAGPGFRLLWSTVKSFLDPKTTSKIHNYSILLCFAYISDVSFICFSELPEFLGGACTCADQGGCMLSDKGPWKNPEIVKMVLHGGAHRAKQVVKVLNSDGKVIAYAKPSYPWIKGSDTSTAESGSEAEDIVVSPKAVKSYSHLRLTPVREEAKVGSGETSFAGSFAGYDEYVPMVDKAVDATWKVKPTAINRAPSKGAHMPPNVPKDHESFSARVLVTFMAFVMAILTFFRTVSNRVVTKQLPPPPSQPQIEGSAAAEEADLLNSVLKKLTELEEKIGALQSKPSEMPYEKEELLNAAVCRVDALEAELIATKKALYEALMRQEELLAYIDRQEAAQHQKKNKRKQMFCF

SEQ ID NO: 22813 - protein, 640 aa, Arabidopsis thaliana
MSGSLDRFARPCFEGVSSNDERRERRSDFEVSEDEKKTRIGNFNFKKKAAKASSKLRHSLKKKGSSRRRSSDRTFSLTIEDIHDVEELRAVDEFRNLLVSENLLPPTLDDYHIMLRFLKARKFDIGKTKLMWSNMIKWRKDFGTDTIFEDFEFEEFDEVLKYYPHGYHGVDKEGRPVYIERLGLVDPAKLMQVTTVERFIRYHVREFEKTVNIKLPACCIAAKRHIDSSTTILDVQGVGFKNFSKPARDLIIQLQKIDNDNYPETLHRMFIINGGSGFKLVWATVKQFLDPKTVTKIHVNLPFYAYPSTFPQVILKIIFNRINYCRCVVVIGHCQLPDFLGGTCTCADRGGCMRSDKGPWNDPEILKMLQSGGPLCRHNSALNSFSRVSSCDKPSFSGIKASDTSTAESGSEVEEMASPKVNRELRVPKLTPVCEDIRGTAISYPTDSSEYDSPMVDKVVDVAWMAHEKPKASKGSEDTPDSGKIRTVTYIWRWLMMFFVNLFTLLISLALPQREGHSQSESSVDGPNARESRPPSPAFATIAERNVFSSVVNRLGDLEKQVETLHSKRHEMPREKEELLNTAVYRVDALEAELIATKKALHEALMRQDDLLAYIDREEDEKYHKLSYSICLVYAYMNES

SEQ ID NO: 22814 - protein, 248 aa, Arabidopsis thaliana
MADTMVAHMDRHNKIDVEISEDDKRLTKLCSLKKKAINATNKFKHSMTKKGRRHSRVACVSIVDEIDTEELQAVDAFRQALILDELLPSKHDDHHMMLRFLRARKFDLEKAKQMWSDMLNWRKEYGADTIMEDFDFKEIEEVVKYYPQGYHGVDKEGRPIYIERLGQVDATKLMKVTTIDRYVKYHVKEFEKTFNVKFPACSIAAKRHIDQSTTILDVQGVGLSNFNKAAKDLLQSIQKIDNDNYPEV

SEQ ID NO: 22815 - protein, 636 aa, Arabidopsis thaliana
MSGKFRCLIRFSHLLRLCSLLRLCFFSIEGVEEISTLDEFRERRSDFEISEDERRRSKIGNLKKKAINASTKFTHSLKKRGKRKIDYRVPAVSIEDVRDEKEESVVLEFRRKLLERDLLPPRHDEYHTLLRFLKARDLNIEKTTQLWEEMLRWRKEYGTDTILEDFDFEELEEVLQYYPQGYHGVDKEGRPVYIERLGKAHPSKLMRITTIDRYLKYHVQEFERALQEKFPACSIAAKRRICSTTTILDVQGLGIKNFTPTAANLVAAMSKIDNSYYPEVLDFLNFTSHMFFTCIPSCLKSSYYFADVAQNVHCKCWNSQLPEFLGGSCSCFGDGGGCLRSNKGPWNDPEIMKLIYHGESSLFRQSTRKLTDPHYSSSYISIHPSKAIQAETSAAESISCSDVPSSPTGRLCSASSHVNSAYEEARASDVNGYYSCDDKFAIPDKATNRKGQERQSQYQMRELNATTIGLKCETSSPGAPIIRWLHDLRVMIDKIKCENLAKRLLSLMLKLAAVFRYTPLELLRSQTTVSPSSLTEDDSRCSLISPPPREPTMKDRILPCLERIQKLEKSYEDIRNKPVAIPVEKERMLMDSLDRIKSVEFDLDKTKRLLHATVMKQMEITEMLQNIRDSQLHVRT

SEQ ID NO: 22816 - protein, 390 aa, Arabidopsis thaliana
MIPQNLGSFKEESSKLSDLSNSEKKSLDELKHLVREALDNHQFTNTPEEVKIWGIPLLEDDRSDVVLLKFLRAREFKVKDSFAMLKNTIKWRKEFKIDELVEEDLVDDLDKVVFMHGHDREGHPVCYNVYGEFQNKELYNKTFSDEEKRKHFLRTRIQFLERSIRKLDFSSGGVSTIFQVNDMKNSPGLGKKELRSATKQAVELLQDNYPEFVFKQAFINVPWWYLVFYTVIGPFMTPRSKSKLVFAGPSRSAETLFKYISPEQVPVQYGGLSVDPCDCNPDFSLEDSASEITVKPGTKQTVEIIIYEKCELVWEIRVTGWEVSYKAEFVPEEKDAYTVVIQKPRKMRPSDEPVLTHSFKVNELGKVLLTVDNPTSKKKKLVYRFNVKPL

SEQ ID NO: 22817 - protein, 490 aa, Arabidopsis thaliana
MAEEPTTTTLVTPEKLPSPSLTPSEVSESTQDALPTETETLEKVTETNPPETADTTTKPEEETAAEHHPPTVTETETASTEKQEVKDEASQKEVAEEKKSMIPQNLGSFKEESSKLSDLSNSEKKSLDELKHLVREALDNHQFTNTPEEVKIWGIPLLEDDRSDVVLLKFLRAREFKVKDSFAMLKNTIKWRKEFKIDELVEEDLVDDLDKVVFMHGHDREGHPVCYNVYGEFQNKELYNKTFSDEEKRKHFLRTRIQFLERSIRKLDFSSGGVSTIFQVNDMKNSPGLGKKELRSATKQAVELLQDNYPEFVFKQAFINVPWWYLVFYTVIGPFMTPRSKSKLVFAGPSRSAETLFKYISPEQVPVQYGGLSVDPCDCNPDFSLEDSASEITVKPGTKQTVEIIIYEKCELVWEIRVTGWEVSYKAEFVPEEKDAYTVVIQKPRKMRPSDEPVLTHSFKVNELGKVLLTVDNPTSKKKKLVYRFNVKPL

SEQ ID NO: 22818 - protein, 341 aa, Arabidopsis thaliana
MGIVSEEAIDEFQELMDQVEEPLKKTYERVHQGYLRENLGRFLKARDWNVCKAHTMLVECLRWRVDNEIDSILSKPIVPTELYRDVRDSQLIGMSGYTKEGLPVFAIGVGLSTFDKASVHYYVQSHIQINEYRDRVLLPSISKKNGRPITTCVKVLDMTGLKLSALSQIKLVTIISTIDDLNYPEKTNTYYVVNAPYIFSACWKVVKPLLQERTRKKVHVLSGCGRDELLKIMDFTSLPHFCRSGSSGSSHHTQSANCFSINHPFHQQLYNYVKHHYETQGQAEPAKQGSFHVGFPEPEAERCVIAKTIESELHKFENRNGLAVSIDDRKSSHETLANGDL

SEQ ID NO: 22819 - protein, 723 aa, Arabidopsis thaliana
MSQDSATTTPPPPLTSDVSMPSGEEDEPKHVTSEEEAPVTSETNLKLPLMPELEESNHTAEVVSEKVTPETMTLESEGLNHAAEDSEQTHEVTPETETAKLEVLNHTAEDSEQTHEVTPEKETVKSEFLNHVAEDSEQTHEVTPETETVKSEVLNHAAEDSEQPRGVTPTPETETSEADTSLLVTSETEEPNHAAEDYSETEPSQKLMLEQRRKYMEVEDWTEPELPDEAVLEAAASVPEPKQPEPQTPPPPPSTTTSTVASRSLAEMMNREEAEVEEKQKIQIPRSLGSFKEETNKISDLSETELNALQELRHLLQVSQDSSKTSIWGVPLLKDDRTDVVLLKFLRARDFKPQEAYSMLNKTLQWRIDFNIEELLDENLGDDLDKVVFMQGQDKENHPVCYNVYGEFQNKDLYQKTFSDEEKRERFLRWRIQFLEKSIRNLDFVAGGVSTICQVNDLKNSPGPGKTELRLATKQALHLLQDNYPEFVSKQIFINVPWWYLAFYRIISPFMSQRSKSKLVFAGPSRSAETLLKYISPEHVPVQYGGLSVDNCECNSDFTHDDIATEITVKPTTKQTVEIIVYEVRPFCIKTFYTTFSNAHFCVCVWKITNCGFNTKYLRFSYVLKSSYICASKHFFLQKCTIVWEIRVVGWEVSYGAEFVPENKEGYTVIIQKPRKMTAKNELVVSHSFKVGEVGRILLTVDNPTSTKKMLIYRFKVKPLACE

SEQ ID NO: 22820 - protein, 540 aa, Arabidopsis thaliana
MTAEVKVEEKQVESEVVIAPAVVPEETTVKAVVEETKVEEDESKPEGVEKSASFKEESDFFADLKESEKKALSDLKSKLEEAIVDNTLLKTKKKESSPMKEKKEEVVKPEAEVEKKKEEAAEEKVEEEKKSEAVVTEEAPKAETVEAVVTEEIIPKEEVTTVVEKVEEETKEEEKKTEDVVTEEVKAETIEVEDEDESVDKDIELWGVPLLPSKGAESTDVILLKFLRARDFKVNEAFEMLKKTLKWRKQNKIDSILGEEFGEDLATAAYMNGVDRESHPVCYNVNSEELYQTIGSEKNREKFLRWRFQLMEKGIQKLNLKPGGVTSLLQIHDLKNAPGVSRTEIWVGIKKVIETLQDNYPEFVSRNIFINVPFWFYAMRAVLSPFLTQRTKSKFVVARPAKVRETLLKYIPADELPVQYGGFKTVDDTEFSNETVSEVVVKPGSSETIEIPAPETEGTLVWDIAVLGWEVNYKEEFVPTEEGAYTVIVQKVKKMGANEGPIRNSFKNSQAGKIVLTVDNVSGKKKKVLYRYRTKTESSS

SEQ ID NO: 22821 - protein, 255 aa, Arabidopsis thaliana
MENKETKQEPAAAAEQKTVPLIEDEIERSKVGIMRALCDRQDPETKEVDDLMIRRFLRARDLDIEKASTMFLNYLTWKRSMLPKGHIPEAEIANDLSHNKMCMQGHDKMGRPIAVAIGNRHNPSKGNPDEFKRFVVYTLEKICARMPRGQEKFVAIGDLQGWGYSNCDIRGYLAALSTLQDCYPERLGKLYIVHAPYIFMTAWKVIYPFIDANTKKKIVFVENKKLTPTLLEDIDESQLPDIYGGKLPLVPIQET

SEQ ID NO: 22822 - protein, 482 aa, Cicer arietinum
DDKKPQEEEKKEEVAEEKKEEVEEEKKKEEVEEEKKKEEVVVEKKVEEEVEKKEEKQGSSSEEPKTEAKPETEAVEKKVDVTVVELVEKIATSAEEDGAKTVEAIQESIVSVTVTNGDGEQPAADVELPPSTPEEVEIWGIPLLADERSDVILLKFLRARDFKVKEAFTMIKQTVIWRKEFGIEGLLQEDLGTDWEDLGTDWDKVVFTDGYDKEGHPVCYNVFGEFENKDLYQKTFSDEEKRNKFIRWRIQFLEKSVRKLNFAPSAISTFVQVNDLKNSPGLGKRELRQATNQALQLLQDNYPEFVAKQIFINVPWWYLAFSRMISAFLTPRTKSKFFFAGPSKSADTLFKYIAPEQVPVQYGGLSREGDQEFTTADPATEVTIKPATKHAVEFPIPEKSTLVWEVRVVGWDVSYGAEFVPSAEDGYTVIVQKNRKIAPADETVINNTFKIGEPGKVVLTIDNQTSKKKKLLYRSKTIPISE

SEQ ID NO: 22823 - protein, 626 aa, Glycine max
  unsure (1)..(626): unsure at all Xaa locations
MSGPLDRFARPCFEGFSGSDEKKERRSDFENSEDERRTRIGSLKKKALNASSKFKHTLRKKSSRRKSDGRVSSVSIEDVRDFEELQAVDAFRQSLIMDELLPEAFDDYHMMLRFLKARKFDIEKAKHMWTDMLQWRKEFGADTIVQDFEFKELDEVVKYYPHGHHGVDKEGRPVYIERLGKVDPNKLMQVTTLDRYVKYHVQEFEKAFAIKFPACSIAXKRHIDSSTTILDVHGVGLKNFTKSARELITRLQKIDGDNYPETLCQMFIINAGPGFRLLWNTVKSFLDPKTTSKIHVLGNKYQSKLLEVIDASELPEFLGGTCTCEDQGGCLRSDKGPWKNPDIFKMVLNGGAWRSKQVVKVLNNERKVIVYAKPEYPMVKGSDTSTAESGSEAEDISSPKGMKSYSXHLTLTPWFMRQAKIVGKTSYASNLSGYDEYVPMVDIPVDAGWKKQASLQRSYTSKGAPPPDTQKTPEGIQARMWVALSIFFLTVLTLLRQVAYPVTKKFPALSSNDDKSTSKPPPDTTNMEVLPPSSTPSCTEENLLPSMLKRIGELEEKVDTLXQSKPSEMPYEKDEXLNAAVCRVDALEAELIASKKALYEALMRQEELLAYIDSQEKARLRKKFCW

SEQ ID NO: 22824 - protein, 604 aa, Glycine max
  unsure (1)..(604): unsure at all Xaa locations
TTSIFVDMSTNLCFEGMDERRERKLSFENNSEDDRWAKIGSLKKKALFASTKFRHSFKKKRSRKIDSRSNSLSIEDVRDVKDLQAVDAFRQALVLDNMLPPIHDDYHMLLRFLKARKFDIEKAKHMWANMIQWRKEYGTDTIMEDFEFKELNEVLKYYPHGYHGVDREGRPVYIERLGKVDPNRLMQVTTLERYLRYHVQGFEKTFAVKFPACSIAAKRHIDSSTTILDVQGVGFKNLTKSARELITRLQKIDGDYYPETLCQMFIINAGPGFKMLWNTVKTFLDPKTTSKIHVLGNKFQSKLLEIIDESELPEFLGGSCTCVDQGGCMRSDKGPWQDPNILKMVLSGEVGCSKQIVTVSNDEGRVIECDKISFPMIRGSDTSTGESGSEVEDIASPKACGNCISPMLTPVLEEARMVGKTSHAGNXXVEYVPTVDKAIDVGPKEKQATPRMXXFCSTAGFILALYTFARSIAFRVTKGIRYSDSDSARNILNMTVDFQYPWRGIXVLISCAPGGFTKTNLPSSTLKRLGELEEKVDMLQSKPSVMPHEKEELLNAAVYRVDALEAELIATKKALYEALIRQEELMAYIDSQERDKXXKRKGCW

SEQ ID NO: 22825 - protein, 658 aa, Glycine max
  unsure (1)..(658): unsure at all Xaa locations
MSGPXLDRFARPCFEGFSGSDEKKERRSDFENSEDERRTRIGSLKKKALNASSKFKHTLRKKSSRRKSDGRVSSVSIEDVRDFEELQAVDAFRQSLIMDELLPEAFDDYHMMLRFLKARKFDIEKAKHMWTDMLQWRKEFGADTIVQDFEFKELDEVVKYYPHGHHGXVDKEGRPVYIERLGKVDPNKLMQVTTLDRYVKYHVQEFEKAFAIKFPACSIAAKRHIDSSTTILDVHGVGLKNFTKSARELITRLQKIDGDNYPETLCQMFIINAGPGFRLLWSTVKSFLDPKTTSKIHVLGNKYQSKLLEVIDASELPEFLGGTCTCEDQGGCLRSDKGPWKNPDIFKMVLNGGAWRSKQVVKVLNNERKVIVYAKPGYPTVKGSDTSTAESGSEAEDISSPKAMKSYSHLTLTPVHEEAKIVGKTSYASNLSGYDEYIPMVDIPVDAGWKKQASLQRSYTSKGAPPPLDTQKTPDGLQARMWVALSVFFLTVLTLLRQVAYPVTSKPLPDTANMDVLPPSSTPTEENLLPSMLKRLGELEEKVDTLQSKPSEMPYEKEELLNAAVCRVDALEAELIATKKALYDALMRQEELLAYIDRQEEAKLRKKNKTRAFFCYGYLHLSCFDLYAFVSRKAFFPPSISRLLVLSIFSVVLNLIDA

SEQ ID NO: 22826 - protein, 318 aa, Glycine max
  unsure (1)..(318): unsure at all Xaa locations
VLDSLSSNPARPEEAINSNDTMSGTMSPKGSFKKKAINASNMLRNSLTRKGRRSSKVMSVEIEDVHDAEELKIVDEFRQALILDELLPAKHDDYHMMLRFLKARKFDIEKTKQMWSEMLKWRKEFGADTITEDFEFKELDEVLQYYPQGHHGVDKDGRPVYIERLGQVDATKMMQVTTMDRYIKYHVKEFERTFDVKFAACSIAAKKHIDQSTTILDVQGVGLKSFSKHARELVTRLQKIDGDNYPETLNRMFIINAGSGFRILWNTVKSFLDPKTTAKINVLGNKYDTKLLEIIDASELPEFLGGTCTCADQGGCMX

SEQ ID NO: 22827 - protein, 630 aa, Glycine max
  unsure (1)..(630): unsure at all Xaa locations
MSGPLDRFARPCFEGFSGSDEKKERRSDFENSEDERRTRIGSLKKKALNASSKFKHSLKKKSSRRKSDGRVSSVSIEDVRNFEEQQAVDAFRQALIMERMLPEKHDDYHVMVRXFLKARKFGIERAKHMGADMLQWRKEFGTDTIMEDFEFKEIDEVVNYYPHGHHGVDKEGRPVYIERLGKVDPNKLMQVTTMDRYVKYHVQEFEKAFKIKFPACTIAVKRHIDSSTTILDVQGVGLKNFTKSARDLIMRLQKIDGDNYPETLCQMFIINAGPGFRLLWNTVKSFLDPKTTSKIHVLGNKYQSKLLEIIDASELPEFLGGTCTCADQGGWLRSDKGPWKNPEILKMILSGEARRARPVVKVLNSEGKVIAYARPQYPMVKGSDTSTAESGSEAEDIASPKVTKSYSHLRLTPVREEAKVVGKLSSAGGGNLAGYDEYVPMVDKAVDAAWKNQASLQRSQTSKGKPPLPDTPNPPEGIRARIVVALTVFFMTLFTLFHSFACRVTKKLPAVSSNDDQGTSEPTLDITKINNDDYCPPSPTPAYAEANLLSSMMKRLGELEVKVDTLQSKPSEMPYEKEELLNAAVCRVDALEAELIATKKALYEALMRQEELLAYIDSQEEARLRKKFCW

SEQ ID NO: 22828 - protein, 618 aa, Glycine max
  unsure (1)..(618): unsure at all Xaa locations
TTSIFVDMSTNLCFEGMDERRERKLSFENNSEDDRWAKIGSLKKKALFASTKFRHSFKKKRSRKIDSRSNSLSIEDVRDVKDLQAVDAFRQALVLDNMLPPIHDDYHMLLRFLKARKFDIEKAKHMWANMIQWRKEYGTDTIMEDFEFKELNEVLKYYPHGYHGVDREGRPVYIERLGKVDPNRLMQVTTLERYLRYHVQGFEKTFAVKFPACSIAAKRHIDSSTTILDVQGVGFKNLTKSARELITRLQKIDGDYYPETLCQMFIINAGPGFKILWNTVKTFLDPKTTSKIHVLGNKFQSXLLEIIDEXEFLGGSCTCVDQGGCMRSDKGPWQDPNILKMVLSGEVECSKQIVTVSNDEGTVIECDKACYPTIRSSDTSTAESGSEVEDITSPKASGNYTNPMLTPVHEEARLIGRASDSLXXYDEYVPMVDKAIDLGWKEKQATTRNLFCSTASTFPSIQNFQDGCEAAMFSTNIIFFXXIGNRDRSLAFRVTKGIQDTKSDSAKNTNTTVDSITKEESRPPSPVPRLTKTELISSALKRLGELEEKVDILQSKPNVMPYEKEELLNAAVYRVDALEAELIATKKALXEALIRQEELMAYIYSQERRKFQRKSICW

SEQ ID NO: 22829 - protein, 650 aa, Glycine max
  unsure (1)..(650): unsure at all Xaa locations
YDGVWCEFDLLIQRLGSTVTGFVLRLXMSMSGFEGQCSNDEIRERRSDIENSEDERRQSRIGTLKKKAMNASSRFTHSLKKRGKRKIDYRVPSVSIEDVRDAREETAVHELRQKLVERGSLPPRHDDYHTLLRFLKARDFNIEKTIQMWEEMLTWRKEYGTDTILEDFEFGELEEVLQYYPQGYHGVDKEGRPVYIERLGKAHPSRLMHITTIDRYLNYHVQEFERTLQEKFPACSIAAKRQISSTTTILDVQGLGMKNFSRTAANLLSAVTKIDSSYYPETLHQMYIVNAGSGFKKMLWPATQKFLDSKTIAKIQILDSKSLYKLLEVIDSSQLPDFLGGSCTCAAXXGGCLRSNKGPWNDPDIMKLVHNEEATFVRQITRMPNGQHTFDSFQMHPLKERCSDTSTTAESGSDMNDYSSPNRHRSCPYPHLAPVHEEVKAPDLNGYYSCDDSALAVEKVIESDHFHLNREQPLQTNNIGNISCRTDSGGTYVNSWFSIVKEKIEKINVLYVARVMTFFMEKLVTLFRYLTFEFWRTQNNVHPPITMEXXNINNHSAAVETASERDYILPCVQRLQRLEKVFEELNNKPDGMPQEKEQMLMDSMDRIKSVEFDLEKTKRVLHAAVMKQLEIAELLENLKKSKCRQRRLFC

SEQ ID NO: 22830 - protein, 477 aa, Glycine max
  unsure (1)..(477): unsure at all Xaa locations
XKTKQMWADMLKWRQEFGADTIMEDFEFNELEEVLKYYPQGHHGIDKDGRPVYIEKLGQVDSIKLMQVTTMERYLKYHVREFERTFAVKLPACSISAKKHIDQSTTLLDVQGVGLKSLNKAARDLLQRLQKIDGDNYPESLNRMFIINAGSGFRLLWNTIKSFLDPKTTSKIHVLGNKYQSKLLEIIDASELPEFLGGTCTCADKGGCMLSDKGPWNDPDILKMVHNGEGKCKRKTLSGIEEKRIIEEGNKESFPERYDVDVQCLSPKKQCTVYKYDAFVPEASRFILEXTLTQKDKDALSKGADCFPSKTCDGYSNHFVGGIMAIVMGIVTMIRMTRNMPRKITEAALYGSSGYYDGTMMKAATFSCNDYMAMMKRMAELEEKVTILSMKPVIPPEKEEVLNNALGRVTTIEQDLVATKKALDDALARQVELQAQIDKKKKKKNKLFRFRCFAXVISNASGRVVKLEAFYFDCLFD

SEQ ID NO: 22831 - protein, 370 aa, Glycine max
SSQLRRPPPRLINSTYQEEQLQTLAQFRTKVAEMGCSNPTYDDTYLLRFLRARKFDLKDTMAMWTNYINWRKEKRVDEICKMEISEMIEAKQYYPHLWFRTDKLGRPIYIERVGKVNFDKLMKIISLERVEQHFIQDSERLIHEIFPACSKAKGETVQNTCYIMDMKGAAAKMMSSKVWDLLKMISKIGQDYYPETLGHMFIINVPLFFYGIWNVVKHFVDDKTRKKIHILGSGYKKELFQYVDEKDLPDFLGGKATVEDYGENLTKEQGPWVKGDNELVNNSPVQEMNRKISTEAGEDDRPSLVLDIPETEQMRTKSVPVLPKSSTSIESLNDMEGYDVATESPLKVRVKSLQTKPSMSFNTLRSFGVI

SEQ ID NO: 22832 - protein, 218 aa, Glycine max
  unsure (1)..(218): unsure at all Xaa locations
MSGPLSPKTSLEKSDRVGSLKKMLRNSLTRSKRRSSSKVMSVEIEDIRDAEESKAVDEFRQALVLDELLPEKHDDYHMLLRFLKARKFDLEKSKQMWSDMLQWRKEFGADTITEDFEFKELDEVLQYYPQGHHGVDKDGRPIYIERLGQVDATKLMQVTTMDRYIKYHVKEFERTFDVKFAACTIAAKKHIDQSTTILDVQGVGLKNFNKHARELITX

SEQ ID NO: 22833 - protein, 299 aa, Glycine max
  unsure (1)..(299): unsure at all Xaa locations
GGVGYWLPDFEFEELEEVLQHYPQGYHGVDKEGRPVYIERLGKAHPSRLMRITTIDRYLKYHVQEFERALQEKFPACTIAAKRRISSTTTVLDVQGLGMKNFSPTAASLLAAISKIDNSYYPETLHRMYIINAGPGFKRMLWPAAQKFLDAKTIAKIQVLEPKSLCKLLDIIDSSQLPDFLGGTCTCPGXXGGCLRSSKGPWNDPDIMKMVHSVEATFERQIARMSNEQQNLDSFXXICPQKGQCSDTSTAESGSDLDDSFSSIGQSRFTFPRLAAVHEEVRVSDNYYSCDDSAPAAEK

SEQ ID NO: 22834 - protein, 211 aa, Glycine max
  unsure (1)..(211): unsure at all Xaa locations
MCDTMSMSSAPITDHRPVKGLEMEYVEDDKKKKLGSLKKVAISASSKFRHSLQMKGRRHSRVVSVAIEDNVDAQELQVVDAFRQALILEELLPAKYDDHHTMLRFLRARKFDIEKTKQMWADMLQWRREFGADTIMEDFEFKERDEVQKYYPQGHHGVDKEGRPVYIEKLGQVDSNKLMQVTTMDRYLKYHVREFEKTFVVKFPACXISAK

SEQ ID NO: 22835 - protein, 232 aa, Glycine max
  unsure (1)..(232): unsure at all Xaa locations
MSGPLDRFARPCFEGFSGSDEKKERRSDFENSEDERRTRIGSLKKKALNASSKFKHSLKKKSSRRKSDGRVSSVSIEDVRNFEEQQAVDAFRQALIMEELLPEKHDDYHVMLRFLKARKFDIERAKHMWADMLQWRKEFGTDTIMEDFEFKEIDEVVNYYPHGHHGVDKEGRPVYIERLGKVDPNKLMQVTTMDRYVKYHVQEFEKAFKIKISACTIVAKRHIDSSTTILDX

SEQ ID NO: 22836 - protein, 186 aa, Glycine max
VDKVEKPVYIERLSKVDPDKLMQVTTMDRYVQYHVHDFEKAFNIKFNACTIDHKRHIDSSTTILDVQGLHLNNFTKSDRDLIMRIQKIDGDNYPETLCQMFIINAGPGFRLLWNTVKSFLDPKTTSKIHVLGNKYQSKLFEIIDASELPEFLGGTCTCADQGGCLRSDKGPWKNPGILKMILNGET

SEQ ID NO: 22837 - protein, 135 aa, Glycine max
  unsure (1)..(135): unsure at all Xaa locations
HXCRFLKARKFDIDXXVQMWADMLHWRKEYGVDSILQEFVYKEYEEVQCYYPHGYHGVDKEGQPVYIERLGKVEPSKLMSVTTVDRXXKYHVQGFEKMFKEKFPACSIAAKRHIDKTTTILDVHGVVKFMLTTTX

SEQ ID NO: 22838 - protein, 118 aa, Glycine max
  unsure (1)..(118): unsure at all Xaa locations
XFLKARKFDIDXXVQMWADMLHWRKEYGVDSILQEYEEVQCYYPHGYHGVDKEGQPVYIERLGKVEPSKLMSVTTVDRXXKYHVQGFEKMFKEKFPACSIAAKRHIDKTTTILDVHGV

SEQ ID NO: 22839 - protein, 517 aa, Glycine max
MAEEAPNQTTTPPPPQESVVQVEEVVVTDVPQPPEKTTTTVPVESDSQPEPEEPVKKPVEETPEFKEESTKLSELPENENKALQDLKKLVQDALNNHHFSSKEDNKNPPPQTAAHKEEVVTETKTDAAPAKTEEEQAAAVDDDGAKTVEAIEETVVAVSSTVQPQAEEKASSPLPPEEVSIWGIPLLADERSDVILLKFLRAREFRVKEAFTMLKNTIQWRKEFGMEELMEEKLGDELEKVVFMHGFDKEGHPVCYNIYGEFQNKELYKKTFSDEEKREKFLRWRIQFLEKSIRKLDFNPGGICTIVHVNDLKNSPGLAKWELRQATKHALQLLQDNYPEFVAKQVFINVPWWYLAVNRMISPFLTQRTKSKFVFAGPSKSTETLLRYIAPEQLPVKYGGLSKDGEFGNIDAVTEITVRPAAKHSVEFSVTENCLLSWELRVIGWEVTYGAEFVPSSEGSYTVIVQKARKVASSEEPVLCNSFKVGEPGKVVLTIDNTSSKKKKLLYRLKTKPSPSD

SEQ ID NO: 22840 - protein, 493 aa, Glycine max
MFHSHQKKQQPPVPVEETVTLETHLSKPNNADDNDNIIPEFKEESTKLSELPENENKALQDLKKLVQDALNNHHFSSKEDNKNPPPQTAAHKEEVVTETKTDAAPAKTEEEQAAAVDDDGAKTVEAIEETVVAVSSTVQPQAEEKASSPLPPEEVSIWGIPLLADERSDVILLKFLRAREFRVKEAFTMLKNTIQWRKEFGMEELMEEKLGDELEKVVFMHGFDKEGHPVCYNIYGEFQNKELYKKTFSDEEKREKFLRWRIQFLEKSIRKLDFNPGGICTIVHVNDLKNSPGLAKWELRQATKHALQLLQDNYPEFVAKQVFINVPWWYLAVNRMISPFLTQRTKSKFVFAGPSKSTETLLRYIAPEQLPVKYGGLSKDGEFGNIDAVTEITVRPAAKHSVEFSVTENCLLSWELRVIGWEVTYGAEFVPSSEGSYTVIVQKARKVASSEEPVLCNSFKVGEPGKVVLTIDNTSSKKKKLLYRLKTKPSPSD

SEQ ID NO: 22841 - protein, 495 aa, Glycine max
MAEEVPKTSTTPEEVVVSDVAPADEKPDTTTDVVVPVEKEQEQETSPEKEKENVPETAETESEVVSKPSDEKPEHKEEQKPVEEEKKEHAAEEETEKEAAEVTVTETEVVEEISASADEDGAKTVEAIEESVVSVTVTVSEEPKVEAVSLSASPEEVCIWGVPLLADDRSDVILLKFLRARDFKVKEALAMIKSTIRWRKEFKMEELLEEDLGGDGLEKAVYMHGFDKEGHPVCYNIYGEFQNKELYKKSFSDEEKRYRFLRWRIQFLEKSIRKLDFNPGGICTIVQVNDLRNSPGPSKWELRQATKQALQLLQDNYPEFVAKQVFINVPWWYLAVNRMISPFLTQRTKSKFVFAGPSKSAETLLRYIAAEQLPVKYGGLSKDGEFGISDAVTEITVRSAAKHTVEFPVTENSLLSWELRVIGWDVSYGAEFVPTSEGSYTVIIQKARKVASSEEPVLCNNYKIGEPGKVVLTIDNQSSKKKKLLYRLKVKPSSD

SEQ ID NO: 22842 - protein, 565 aa, Glycine max
MAEEAPNQTTTPPPPQESVVQVEEVVVTDVPQPPEKTTTTVPVESDSQPEPEEPVKKPVEETVTLETHLSKPNNADDNDNIIPEFKEESTKLSELPENENKALQDLKKLVQDALNNHHFSSKEDNKNPPPQTAAHKEEVVTETKTDAAPAKTEEEQAETKEEEEKKEEVKETNEEAAVDDDGAKTVEAIEETVGAVSSTVQPQAEEKASEPEATKEESSPPLPPEEASIWGIPLLADERSDVILLKFLRAREFKVKEAFTMLKNTIQWRKEFGMEELMEEKLGDELEKVVFMHGFDKEGHPVCYNIYEEFQNKELYKKTFSDEEKREKFLRWRIQFLEKSIRKLDFNPGGICTIVHVNDLKNSPGLAKWELRQATKHALQLLQDNYPEFVAKQVFINVPWWYLAVNRMISPFLTQRTKSKFVFAGPSKSTETLLRYIAPEQLPVKYGGLGKDGEFGNTDAVTEITVRPAAKHTVEFSVTENCLLSWELRVIGWEVSYGAEFVPSSEGSYTVIVQKARKVASSEEPVLCNSFKVGEPGKVVLTIDNTSSKKKKLLYRLKTKPSLSD

SEQ ID NO: 22843 - protein, 265 aa, Glycine max
MEGVSPEPLRSELDSKSKQDTAKEEDDDTFKESTDAEVTKIRLMRAFVESRDPSSKEVDDLMIRRFLRARSLDVEKASAMFLKYLKWKRSFVPNGYISPSEIAEDIAQDKVFTQGLDKKGRPIVVAFAAKHFQSKNGADGFKRYVVFVLEKLCSRMPPGQEKFLAIADIKGWAYVNSDLRGYLNSLSILQDCYPERLGKMLIVHAPYMFMKIWKMIYPFIDENTKKKIVFVENKKLKSTLLEEIEESQIPDIYGGQMPLVPIQNS

SEQ ID NO: 22844 - protein, 383 aa, Glycine max
  unsure (1)..(383): unsure at all Xaa locations
XKKEVEVTEEKKEAEVIEEKKETEVIEEKKESXARGPEVVPEEVEIWGIPLLGDERSDVILLKFLRARDFKVKEALNMIRNTVRWRKEFGIEGLVEEDLGSDWEKVVFKDGYDKEGHPVYYNVFGEFEDKELYSKTFLDEEKRNKFIRWRIQSLEKSVRSLDFSPNGISTIVQVNDLKNSPGLGKRELRQATNQALQLLQDNYPEFVAKQIFINVPWWYLAFSRMISPFFTQRTKSKFVFAGPSKSADTLFRYIAPELVPVQYGGLSREAEQEFTSAYPVTEFTIKPATKHSVEFPVSEKSHLVWEIRVVGWDVSYGAEFVPGAEDGYTVIVQKNRKIGPADETVITNAFKIGEPGKIVLTIDNQTSKKKKLLYRSKTKPIPE

SEQ ID NO: 22845 - protein, 377 aa, Glycine max
  unsure (1)..(377): unsure at all Xaa locations
XLERKRRRKIIPKNTMMLGETHRPNPTVHVPPVVPEEVEIWEIPLLGDEGSDVILLKFLRARDFKVKEALNMIRNTVRWRKEFGIEGLVEEDLGSDWEKVVFKDGYDKEGHPVYYNVFGEFEDKELYSKTFLDEEKRNKFIRWRIQSLEKSVRSLDFSPNGISTIVQVNDLKNSPGLGKRELRQATNQALQLLQDNYPEFVAKQIFINVPWWYLAFSRMISPFFTQRTKSKFVFAGPSKSADTLFRYIAPELVPVQYGGLSREAEQEFTSAYPVTEFTIKPATKHSVEFPVSEKSHLVWEIRVVGWDVSYGAEFVPSAEDGYTVIVHKSRKIAPADETVLTNGFKIGEPGKIVLTIDNQTSKKKKLLYRSKTKPIAE

SEQ ID NO: 22846 - protein, 357 aa, Oryza sativa (japonica cultivar-group)
MSVIHAEDIEISLCDGNSEDERRRRRIGSNLRRKAIHAIKKRGRRRVDCRFPPAISIEDVRDAEEERAVAAFHDRLAAHGLLPDKHDDYHMMLRFLKARKFDIDRAMQMWADMLKWREEFGADTILQDFDFHELDEVLRYYPQGYHGVDREGRPVYIERLGKVDPNKLMQITSVDRYIKYHVQEFERAFRERFPACTLAAKRHIDSTTTILDVQGVGFKNFSKTARELINRMQKIDSDYYPETLHQMFVVNAGSGFKLIWNSVKGFLDPKTSSKIHVLGSNYQSRLLEVIDSSELPDFLGGSCSCSDKGGCLGSNKGPWNDPFILKKGVDYGYLTPVHEETSEEARECPFLYRTCPI

SEQ ID NO: 22847 - protein, 418 aa, Oryza sativa (japonica cultivar-group)
MSFKSIDRLIRRNSKTKLSRNIVDGIYDQKEEQYVQSLRELLLANNQLPEKFDDYHVLLRFLKMRGFNIVKAKEMFLNMLKWREECAVDAIAKDFKFEEYDAVKRCYPHGFHGVDRFGRPLYIERIGLVDLNKLMQVSSTDRYVKYHISEQEKTLSLRYPACSLVAKKHIGSTTAIFDVKGLGMNNFSKSGRDLFIEIQKIDSNYYPETLNQLYIINAGAGFRALWKVLKACMEARTLAKIQVLGTNYLSTILEAVDPSNLPDFLGGTCTCSATGGCLLQDKGPWTDQEISQASKGVFGKGQKSFDEISTTVACENFPGHQEPSVGKLHPISGWKRTLGMLLKDNQVGDTNENIQQNKVNEQISEKIQELENCSAQTQETLHALLQKQNELANHIEQLRKLLREAANADNKANVLILK

SEQ ID NO: 22848 - protein, 492 aa, Oryza sativa (japonica cultivar-group)
MRDAWHALARSTDQSRSARLGDSITLRGIEVGPRVGKAKMAGSIDRPCAGFEGIVHDDDKKEWKSDEDNSEGDKKAKAVSFKNRAISAGNKFRRSLRRKRRRRVGDHVASIEDIRDVKELEAVQRFHQCLHDEGLLPERHDDYHVMLRFLKARKFDIDKAKHMWSEMLRWRKEFGADNIEEFDYSELDDVLECYPQFYHGVDKEGRPVYIELIGKVDPNKLVQVTTIDRYVKYHVKESEKCLQMRFPACSIAAKRHIDSCSTILDVQGVGLKNFSKDARELIMRLQKINNDNYPENLFLSGVITKDLSNTFLVLVQTLHRLYIINAGQGFKMLWGTIKSFLDPQTASKIHVLGSKYQNKLLETIDESELPDFLGGKCRFVLVEKHNDGTGRTSKSNYCVVDSLNQNSTHSSVLRRLGELEEKLQELEAKQSQMPPDREELLNGAIHRVDALEAELISTKKMLYDALMRLDELLAYADQQKNIQFRVSCGFFL

SEQ ID NO: 22849 - protein, 564 aa, Oryza sativa (japonica cultivar-group)
MTEVLSRPLEHRLSSATLDGHYEEKRKSNVEYSEDEKKAKIMSLKKKAMSSSQKLRHSMKKGRRSSKVMSISIADERDPEEVQAVDAFRQLLILEELLPSQHDDYHMMLRFLKARKFDVEKAKQMWADMLRWRKEFGADTILEDFEFEEAGKVAECYPQGYHGVDKEGRPVYIERLGQIDVNRLMQVTTMDRFIKNHVREFEKNFAVKFPACSIATKCHIDQSTTILDVQGVGMKQFSKAARDLIGQLQKIDGDNYPEVLGNKYQSKLLEVIDASELPEFFGGTCQCEGGCMKADKGPWKDDEVMKMVQSGVGWCGNLNLNHLEAEEKMMICEDDTMYTKKQESFKDEGRTLSRKISRARIEHPTLSPVCEELPPMMLPTPGSPYSCDVPMVEKAIDAICQSKGSRDENVAITKAIVNASNGSNPPLFGGVMALVMSIATMLRVSRNMPKKVLGATLGAQSTSKIQAQQLSKISMEAVSAAEYASSTKRLSDIEEKVIAILTKPAEMPADKEEMLKTAVSRVSALEEELAATKKALQETLERQEEIMAYIEKKKKKKSKRLFRW

SEQ ID NO: 22850 - protein, 247 aa, Oryza sativa (japonica cultivar-group)
MAGNRGGDAGEGEWLKVAELRATVEAQDPHAKEVDNLTLRRFLRARDHNVEKASAMLLKALRWRREAVPGGSVPEEKVQSDLDDDKVYMGGADRTGRPILLAFPAKHFSAKRDMPKFKSYCVYLLDSICARIPRGQEKFVCIVDLKGWGYSNCDIRAYIAAIEIMQNYYPERLGKALMIHVPYMFMKAWKMIYPFIDNVTRDKFVFVDDKSLQEVLHQEIDDSQIPDTLGGKLAPVSLKNNARINLD

SEQ ID NO: 22851 - protein, 261 aa, Oryza sativa (japonica cultivar-group)
MDYCKQQERDGHRDDGDVTEWKKVAELRAVVEAQDPACKEEDDYQLRRFLRARDHNIGKASAMLVKYLQWKREVKPGGRAIADEEVRGELAQEKLYMQGYDRQGRPLVYGFGARHFPARRDLDEFKRYVVYVLDRTCARLGGNGGQEKFAAVADLQGWGYYGNCDIRAYVAALEIMQNYYPERLGRVFLIHVPYVFMAAWKIIYPFIDDNTKKKFVFVADKDLHATLRDAIDDSNLAEDYGGKLKLVSPLINGATESNRRR

SEQ ID NO: 22852 - protein, 613 aa, Oryza sativa (japonica cultivar-group)
MAEEPQPEAAPAAVAATTEVAVAEKAPVEAEKEKKVEEETPAVEAEAKEEKKDEAAAAAAAGGDEAGAIEGTGSFKEESNLVADLPDPEKKALDEFKQLIAAALAACEFNLPPPPPPPKAKVEAAVEETKAEETKAEEEPKAEEPAKEEEPKAEVAAAAAAPPEAGTEEPKAEASSEEAKTEEPKAEAAADEPAKEESKAEAAPAEEAKPAEPEPEEKTVVVTEEEAATKTVEAIEETVVPAAAAPAAAATEEAAAPEPEVQAAAAPEPVLIWGVPLVGDDERTDTVLLKFLRAREFKVKEAMAMLRSAVLWRKRFGIESLLDADLALPELDSVVFYRGADREGHPVCYNVYGEFQDKDLYEKAFGDEEKRERFLKWRIQLLERGILSQLDFSPSGICSMVQVTDLKNSPPMLGKHRAVTRQAVALLQDNYPEFIAKKVFINVPWWYLAANKMMSPFLTQRTKSKFIFASPAKSAETLFRYIAPEQVPVQFGGLFKEDDPEFTTSDAVTELTIKPSSKETVEIPVTENSTIGWELRVLGWEVSYGAEFTPDAEGGYTVIVQKTRKVPANEEPIMKGSFKVGEPGKIVLTINNPASKKKKLLYRSKVKSTSESV

SEQ ID NO: 22853 - protein, 502 aa, Oryza sativa
  unsure (1)..(502): unsure at all Xaa locations
MKKGRRSSKVISISIADERDPEEVQAVDAFRQLLVLEELLPSHHDDYHMMLRFLKARKFDVEKAKQMWVDMLQWRKEFAADTILEDFEFEEADKVAECYPQGYHGVDKEGRPVYIERLGQINVNRLMQVTTMDRFIKNHVREFEKNFAVKFPACSIAAKCHIDQSTTILDVQGVGMKQFSKAARDLIGQLQKIDGDNYPETLCRMFIINAGPGFRLLWSTVKSFLDPKTTAKIHVLGNKYQSKLLEVIDASELPEFFGGTCQCXXGGCMKADKGPWKDAEILKMVQSGAGWCGNLSLNHLDAEEKMMICEDDTMHTKTLGSAYSCDVPMVEKAIDAICQSKGLPDENVTEPKRLXNASNGSNPPLYGGIMALVMSIATMLRVSRNMPKKVLGATLGAQSTSKIQAQQLSEISVEAVSVAEYVSSTKRLSDIEEKVIAILTKPAEMPADKEEMLKTAVSRVSALEEELAATKKALQETLERQEEIMAYIEKKKKKKSKRLFRW

SEQ ID NO: 22854 - protein, 565 aa, Oryza sativa
  unsure (1)..(565): unsure at all Xaa locations
MTEVLSRPLEHRLSSPTLDGHYEEKRKSNVEYSEDEKKAKIISLKKKAMSASQKLRHSMKKGRRSSKVISISIADERDPEEVQAVDAFRQLLVLEELLPSHHDDYHMMLRFLKARKFDVEKAKQMWVDMLQWRKEFAADTILEDFEFEEADKVAECYPQGYHGVDKEGRPVYIERLGQINVNRLMQVTTMDRFIKNHVREFEKNFAVKFPACSIAAKCHIDQSTTILDVQGVGMKQFSKAARDLIGQLQKIDGDNYPETLCRMFIINAGPGFRLLWSTVKSFLDPKTTAKIHVLGNKYQSKLLEVIDASELPEFFGGTCQCXXGGCMKADKGPWKDAEILKMVQSGAGWCGNLSLNHLDAEEKMMICEDDTMHTKRQESFKYEGSYSCDVPMVEKAIDAICQSKGLPDENVTEPKRLXNASNGSNPPLYGGIMALVMSIATMLRVSRNMPKKVLGATLGAQSTSKIQAQQLSEISVEAVSVAEYVSSTKRLSDIEEKVIAILTKPAEMPADKEEMLKTAVSRVSALEEELAATKKALQETLERQEEIMAYIEKKKKKKSKRLFRW

SEQ ID NO: 22855 - protein, 615 aa, Oryza sativa
  unsure (1)..(615): unsure at all Xaa locations
MSGPLDRFARPCFEGFTHNDEKKEIRSDADNSEGEKKTKIGSFKKKAINAGNKFRHSLRRRSKKKNEXXRGSIEDIRDVQDLQAVDAFRQCLVDEDLLPQQHDDYHTMLRFLKARKFDVEKAKSMWSDMLKWRKEFGADNIEEFDYTEADEVMKYYPQFYHGVDKEGRPIYIELIGKVDANKLMQVTTIERYVKYHVKEFERCFQMRFPACSIAAKRPIDSSTTILDVQGVGLKNFSKAARDLITRLQKIDNDNYPETLRRMYIINAGQGFKMLWSTVKSFLDPKTASKIHVLGSKYQNKLLEIIDENELPEFFGGKCKCEAFGGCKKSDKGPWKDPNIIKRVLNGEANYGRQIVTISSTDGKIIRYAGPQYPTRKGSDGSAESGSEVEDGASPMASRNLITNPLLTPVHEESKLAAHGFTSASPSIIEESIPVVDKVVDDXXMGQSXXASSSPSRSLPITFDGLWTQVITWLTVLIVSLFAMVRSVPSRMAKRFSSQSTDHDHSYVEYPQEAEYKEVRPPSPAPSYTEKDVLSSMVRRLGELEEKVQALETKPSEMPFEKEELLNAAVRRVDALEAELISTKKALYEALMRQDELLAYIDKQDMIKFRKKKFCF

SEQ ID NO: 22856 - protein, 551 aa, Oryza sativa
  unsure (1)..(551): unsure at all Xaa locations
LFKRSCEFWAWLXINVLNLCLQAQSQAPVGFYKAMSASQKLRHSMKKGRRSSKVISISIADXXRDPEEVQAVDAFRQLLVLEELLPSHHDDYHMMLRFLKARKFDVEKAKQMWVDMLQWRKEFAADTILEFEFEEADKVAECYPQGYHGVDKEGRPVYIERLGQINVNRLMQVTTMDRFIKNHVREFEKNFAVKFPACSIAAKCHIDQSTTILDVQGVGMKQFSKAARDLIGQLQKIDGDNYPETLCRMFIINAGPGFRLLWSTVKSFLDPKTTAKIHVLGNKYQSKLLEVIDASELPEFFGGTCQCXXGGCMKADKGPWKDAEILKSFFNADPRISLFLXCSNGXEKAIDAICQSKGLPDENVTVTKGXTSLRPNNLVTXYCYSLVSFXLTDWIIFFLQRLXXNASNGSNPPLYGGIMALVMSIATMLRVSRNMPKKVLGATLGAQSTSKIQAQQLSEISVEAVSVAEYVSSTKRLSDIEEKVIAILTKPAEMPADKEEMLKTAVSRVSALEEELAATKKALQETLERQEEIMAYIEKKKKKKSKVKKGN

SEQ ID NO: 22857 - protein, 357 aa, Oryza sativa; identical to SEQ ID NO: 22846

SEQ ID NO: 22858 - protein, 323 aa, Oryza sativa
  unsure (1)..(323): unsure at all Xaa locations
XRKRGGRRRRRRVDFRYPAAMSIEDVRDAEEELAVAAFRDRLAVHALLPDKHDDYHMMLRFLKARKFDSEKAMQMWAEMLRWRKEFGADTILEEFEFDELDDVLRYYPQGYHGVDREGRPVYIERLGKVYPNKLMQITSVDRYIKYHVQEFERAFRERFPACTLAAKRHIDSTTTILDVHGVGLKNFSKTARELVHRMQKIDSDYYPETLHQMYVVNAGSGFKLIWNSVKGFLDPKTSSKIHVLGTNYQSRLLEVIDKSELPEFLGGSCTCSXXGGCLGSNKGPWNDHVILKRSTDYSFLTPVSEEVCAVLICXTILYFNXDT

SEQ ID NO: 22859 - protein, 322 aa, Oryza sativa
  unsure (1)..(322): unsure at all Xaa locations
VHALLPDKHDDYHMMLRFLKARKFDSEKAMQMWAEMLRWRKEFGADTILEEFEFDELDDVLRYYPQGYHGVDREGRPVYIERLGKVYPNKLMQITSVDRYIKYHVQEFERAFRERFPACTLAAKRHIDSTTTILDVHGVGLKNFSKTARELVHRMQKIDSDYYPETLHQMYVVNAGSGFKLIWNSVKGFLDPKTSSKIHVLGTNYQSRLLEVIDKSELPEFLGGSCTCSXXGGCLGSNKGPWNDHVILKRSTDYSFLTPVKGSDSSTFCSCESCDRKGLPDVTPESSQSVQQSSEMVPNQLVSHEHSSTTRWMNNLGTSSFS

SEQ ID NO: 22860 - protein, 419 aa, Oryza sativa
  unsure (1)..(419): unsure at all Xaa locations
MLPLYTGSISSYYGRTVRPCATRGTRSPGRRTRADVSRPRGTPTCRLMQRRGCCEPMDPVQXFEGIVHDDDKKEWKSDEDNSEGDKKAKAVSFKNRAISAGNKFRRSLRRKRRRXXVGDHVASIEDIRDVKELEAVQRFHQCLHDEGLLPERHDDYHVMLRFLKARKFDIDKAKHMWSEMLRWRKEFGADNIEEFDYSELDDVLECYPQFYHGVDKEGRPVYIELIGKVDPNKLVQVTTIDRYVKYHVKESEKCLQMRFPACSIAAKRHIDSCSTILDVQGVGLKNFSKDARELIMRLQKINNDNYPETLHRLYIINAGQGFKMLWGTIKSFLDPQTASKIHVLGSKYQNKLLETIDESELPDFLGGKCTYADQQKNIQFRRGTYTQALNISVKAHGXRPVQYXSTFNYDQSETSAILX

SEQ ID NO: 22861 - protein, 272 aa, Oryza sativa
MSIEDVRDAEEELAVAAFRDRLAVHALLPDKHDDYHMMLRFLKARKFDSEKAMQMWAEMLRWRKEFGADTILEEFEFDELDDVLRYYPQGYHGVDREGRPVYIERLGKVYPNKLMQITSVDRYIKYHVQEFERAFRERFPACTLAAKRHIDSTTTILDVHGVGLKNFSKTARELVHRMQKIDSDYYPETLHQMYVVNAGSGFKLIWNSVKGFLDPKTSSKIHVLGTNYQSRLLEVIDKSEGGCLGSNKGPWNDHVILKESTDYSFLTPVSEE

SEQ ID NO: 22862 - protein, 623 aa, Oryza sativa
  unsure (1)..(623): unsure at all Xaa locations
SIGPVSANCFPCFEGIVHDDDKKEWKSDEDNSEGDKKAKAVSFKNRAISAGNKFRRSLRRKRRRXXVGDHVASIEDIRDVKELEAVQRFHQCLHDEGLLPERHDDYHVMLRFLKARKFDIDKAKHMWSEMLRWRKEFGADNIEVEFDYSELDDVLECYPQFYHGVDKEGRPVYIELIGKVDPNKLVQVTTIDRYVKYHVKESEKCLQMRFPACSIAAKRHIDSCSTILDVQGVGLKNFSKDARELIMRLQKINNDNYPETLHRLYIINAGQGFKMLWGTIKSFLDPQTASKIHRLGLFYCHKYCSLVPILIILFNSCXFSELPDFLGGKCRCEEHGGCIKSDKGPWKDPDIIKRVLNGEANYGRKILAISSVDGKKICYINPRHLTVKKCSDASAESSSEMEDVSSPIASVNPIINPHLTPVDEARSCTSGNTSTSGAPPRVEXXIPVVDKAVDTXXAGPSTSSMAFNSGLYMTPNITMELGGLRNRITAWLIVLIVSFVAVLRSVPSRVTASLSSQAISQFXPPSSPGFTENSTHSSVLRRLGELEEKLQELEAKQSQMPPDREELLNGAIHRVDALEAELISTKKMLYDALMRLDELLAYADQQKNIQFRVSYMQKKRFCF

SEQ ID NO: 22863 - protein, 617 aa, Oryza sativa
  unsure (1)..(617): unsure at all Xaa locations
MSGPLDRFARPCFEGFTHNDEKKEIRSDADNSEGEKKTKIGSFKKKAINAGNKFRHSLRRRSKKKNEXXRGSIEDIRDVQDLQAVDAFRQCLVDEDLLPQQHDDYHTMLRFLKARKFDVEKAKSMWSDMLKWRKEFGADNIEQEFDYTEADEVMKYYPQFYHGVDKEGRPIYIELIGKVDANKLMQVTTIERYVKYHVKEFERCFQMRFPACSIAAKRPIDSSTTILDVQGVGLKNFSKAARDLITRLQKIDNDNYPETLRRMYIINAGQGFKMLWSTVKSFLDPKTASKIHVSQLYIFFIHPNFCPLHVFSELPEFFGGKCKCEAFGGCKKSDKGPWKDPNIIKRVLNGEANYGRQIVTISSTDGKIIRYAGPQYPTVKGSDGSAESGSEVEDGASPMASRNLITNPLLTPVHEEAKIGSTWIYTASPSIIEESIPVVDKVVDDGWGTEPEPELSHDSRXGSSPSRSLPITFDGLWTQVITWLTVLIVSLFAMVRSVPSRMAKRFSSQSTDHDHSYVEYPQEADEKDVLSSMVRRLGELEEKVQALETKPSEMPFEKEELLNAAVRRVDALEAELISTKKALYEALMRQDELLAYIDKQDMIKFRVRYSFLTLFFL

SEQ ID NO: 22864 - protein, 390 aa, Oryza sativa
  unsure (1)..(390): unsure at all Xaa locations
KRYQTACKLGLLLFPSKCQFGADQRVWRACSRLTRGKIEGQMXENSEDERRRLSIGSLKKKALNASNKLTHSLKKRGKRKVENRPSFTIEDVRDEEEERAVFSFQQELFSRNLLPDKHNDYHMLLRFLKARKFDTEKAIQMWAEMLQWRKEFGADTILEDFNFEELDEVLVYYPQGYHGVDRQGXPVYIERLGKVEPNKLMHITTVDRYIKYHVQEFERAFHEKFPACSIAAKRHIDSTTTILDVDGVGLKNFSKTARDMLGRMQKIDSDYYPETLHQMFVVNAGNGFKLLWNTVKGFLDPKTASKIHVLSSCLXFNAHCFAIYSQLPEFLGGACTCAAEGGCLKSNKGPWNDPNIMKCLVDLDYLTYYIKTPISLFSACLXIINRTCYI

SEQ ID NO: 22865 - protein, 322 aa, Oryza sativa
  unsure (1)..(322): unsure at all Xaa locations
LGGTVRPNFRRNIVDGIYDQKEEQYVQSLRELLLANNQLPEKFDDYHVLLRFLKMRGFNIVKAKEMFLNMLKWREECAVDAIAKDFKFEEYDAVKRCYPHGFHGVDRFGRPLYIERIGLVDLNKLMQVSSTDRYVKYHISEQEKTLSLRYPACSLVAKKHIGSTTAIFDVKGLGMNNFSKSGRDLFIEIQKIDSNYYPETLNQLYIINAGAGFRALWKVLKACMEARTLAKIQVLGTNYLSTILEAVDPSNLPDFLGGTCTCSATGGCLLQDKGPWTDQEISRKINEQYQLCKKFRNGKXXVVDNNDGNKKRHGINIKLVGX

SEQ ID NO: 22866 - protein, 609 aa, Oryza sativa
  unsure (1)..(609): unsure at all Xaa locations
MNPARARGTGQPLRVYGPGPCTESDRILFVSSRLPRESFPPLKPIAAAAGASLSFWSKIIAQNPRLELLLGRLILESEEGMSGPLDRFARPCFEGFTHNDEKKEIRSDADNSEGEKKTKIGSFKKKAINAGNKFRHSLRRRSKKKNEXXRGSIEDIRDVQDLQAVDAFRQCLVDEDLLPQQHDDYHTMLRFLKARKFDVEKAKSMWSDMLKWRKEFGADNIEEFDYTEADEVMKYYPQFYHGVDKEGRPIYIELIGKVDANKLMQVTTIERYVKYHVKEFERCFQMRFPACSIAAKRPIDSSTTILDVQGVGLKNFSKAARDLITRLQKIDNDNYPETLRRMYIINAGQGFKMLWSTVKSFLDPKTASKIHXXVLNGEANYGRQIVTISSTDGKIIRYAGPQYPTXQNWQHMDLXSASPSIIEESIPVVDKVVDDXXMGQSXXASSSPSRSLPITFDGLWTQVITWLTVLIVSLFAMVRSVPSRMAKRFSSQSTDHDHSYVEYPQEAEYKEVRPPSPAPSYTEKDVLSSMVRRLGELEEKVQALETKPSEMPFEKEELLNAAVRRVDALEAELISTKKALYEALMRQDELLAYIDKQDMIKFRKKKFCF

SEQ ID NO: 22867 - protein, 435 aa, Oryza sativa
MSIEDVRDAEEELAVAAFRDRLAVHALLPDKHDDYHMMLRFLKARKFDSEKAMQMWAEMLRWRKEFGADTILEEFEFDELDDVLRYYPQGYHGVDREGRPVYIERLGKVYPNKLMQITSVDRYIKYHVQEFERAFRERFPACTLAAKRHIDSTTTILDVHGVGLKNFSKTARELVHRMQKIDSDYYPETLHQMYVVNAGSGFKLIWNSVKGFLDPKTSSKIHGMMSDISNAESESDVDEFSLSAVLRSTDYSFLTPVSEEVKGSDSSTFCSCESCDRKGLPDVTPESSQSVQQSSEMVPNQLVSHEHSSTTRWMNNLGNMAISFHGTLTGRTLSNFVRVVGTLMIKILAVFSLFVSRRGNMLENVHPSNVEDEPQPRSATEDNMSACLQRLEKLESLCNHLMSKPPDMPKEKECLLLQSFDRIKTIESDLERTKR

SEQ ID NO: 22868 - protein, 614 aa, Oryza sativa
  unsure (1)..(614): unsure at all Xaa locations
MLMQRRGCCEPMDPVHERIRVTPPPLLPCPLPPPMKRKQKLLFPSPPKQKHQNIPPKSKEKQSISNEPSLSILVPLLSPRIPPPETLVHRRAARLGDSITLRGIEVGPRVGKAKMAGSIDRPCAGFEGIVHDDDKKEWKSDEDNSEGDKKAKAVSFKNRAISAGNKFRRSLRRKRRRXXVGDHVASIEDIRDVKELEAVQRFHQCLHDEGLLPERHDDYHVMLRFLKARKFDIDKAKHMWSEMLRWRKEFGADNIEEFDYSELDDVLECYPQFYHGVDKEGRPVYIELIGKVDPNKLVQVTTIDRYVKYHVKESEKCLQMRFPACSIAAKRHIDSCSTILDVQGVGLKNFSKDARELIMRLQKINNDNYPETLHRLYIINAGQGFKMLWGTIKSFLDPQTASKIHXXVLNGEANYGRKILAISSVDGKKICYINPRHLTSKLPDTSTSGAPPRVEDIPVVDKAVDTXXAGPSTSSMAFNSDSFSLRNITMELGGLRNRITAWLIVLIVSFVAVLRSVPSRVTXXSLSSQAISRENSTHSSVLRRLGELEEKLQELEAKQSQMPPDREELLNGAIHRVDALEAELISTKKMLYDALMRLDELLAYADQQKNIQFR

SEQ ID NO: 22869 - protein, 401 aa, Oryza sativa
  unsure (1)..(401): unsure at all Xaa locations
MTEVLSRPLEHQRDPEEDFEFEEADKVAECYPQGYHGVDKEGRPVYIERLGQINVNRLMQVTTMDRFIKNHVREFEKNFAVKFPACSIAAKCHIDQSTTILDVQGVGMKQFSKAARDLIGQLQKIDGDNYPETLCRMFIINAGPGFRLLWSTVKSFLDPKTTAKIHVLGNKYQSKLLEVIDASELPEFFGGTCQCXXGGCMKADKGPWKDAEILKTLGSAYSCDVPMVEKAIDAXLPEQGIARXECHSNQSDCXXASNGSNPPLYGGIMALVMSIATMLRVSRNMPKKVLGATLGAQSTSKIQAQQLSEISVEAVSVAEYVSSTKRLSDIEEKVIAILTKPAEMPADKEEMLKTAVSRVSALEEELAATKKALQETLERQEEIMAYIEKKKKKKSKRLFRW

SEQ ID NO: 22870 - protein, 302 aa, Oryza sativa
  unsure (1)..(302): unsure at all Xaa locations
WRACSRLTRGKIEGQMXENSEDERRRLSIGSLKKKALNASNKLTHSLKKRGKRKVENRPSFTIEDVRDEEEERAVFSFQQELFSRNLLPDKHNDYHMLLRFLKARKFDTEKAIQMWAEMLQWRKEFGADTILEDFNFEELDEVLVYYPQVDRYIKYHVQEFERAFHEKFPACSIAAKRHIDSTTTILDVDGVGLKNFSKTARDMLGRMQKIDSDYYPETLHQMFVVNAGNGFKLLWNTVKGFLDPKTASKIHVLGTKFHGKLLEVIDASQLPEFLGGACTCAAEGGCLKSNKGPWNDPNIMK

SEQ ID NO: 22871 - protein, 270 aa, Oryza sativa
  unsure (1)..(270): unsure at all Xaa locations
WRACSRLTRGKIEGQMXENSEDERRRLSIGSLKKKALNASNKLTHSLKKRGKRKVENRPSFTIEDVRDEEEERAVFSFQQELFSRNLLPDKHNDYHMLLRFLKARKFDTEKAIQMWAEMLQWRKEFGADTILEDFNFEELDEVLVYYPQGYHGVDRQGXPGLKNFSKTARDMLGRMQKIDSDYYPETLHQMFVVNAGNGFKLLWNTVKGFLDPKTASKIHVLGTKFHGKLLEVIDASQLPEFLGGACTCAAEGGCLKSNKGPWNDPNIMK

SEQ ID NO: 22872 - protein, 206 aa, Oryza sativa
  unsure (1)..(206): unsure at all Xaa locations
AAAAEGGGGEDERRARALSSSSSSLRQRAMSARSSKGAAARQRSSKVMSVSIEDVRDAEEMKSVDAFRQTLVLEELLPARHDDYHMMLRFLRARKFDIDKSKQMWSDMLQWRKEFGSDTILDDFQFEEMDQVLEHYPQGHHGVDRDGXRPVYIEKLGAIDTAKLLQVTSMDRYVKYHVREFERAFAVKFPACSIAAKRHVDQSTTX

SEQ ID NO: 22873 - protein, 447 aa, Oryza sativa
  unsure (1)..(447): unsure at all Xaa locations
XKVDPNKLMHVTTMDRYVRYHVKEFERSFLIKFPACSLAAKRHIDSSTTILDVQGVGLKNFSKTARELIVRLQKIDNDNYPETLYQMFIVNAGPGFRLLWNTVKSFLDPKTTSKIHVLGNKYQSKLLEVIDASELPEFLGGACTCPEYGGCLKAEKGPWKDQNILNIVLSGEAQCARQIVTVSNGEEKIISYAKSKHHTIRGSDTSTAESGSEAEDVTSPKVLRSYISHPKLTPVREEVKMVRATSFSTRMPEYDVPVVDKAVDATWKREVTRKTAFSSKDSSLTSTESSSNGSLDRIVAVLLAVFMAIITLVRSVKDLAAKRLPDKNESEQKYSTLYPDSMPKEEFRPPSPTPGFVEAELFSSVLQRLGDLEEKFLMLQDKPSEMPCEKEELLNAAVRRVDALEAELIVTKKALHEALIRQEELLAYIDSKEVAKAQKKKKAMFCY

SEQ ID NO: 22874 - protein, 247 aa, Oryza sativa
MAGNRGGDAGEGEWLKVAELRATVEAQDPHAKEVDNLTLRRFLRARDHNVEKASAMLLKALRWRREAVPGGSVPEEKVQSDLDDDKVYMGGADRTGRPILLGFPVKNFSAKRDMPKFKSYCVYLLDSICARIPRGQEKFVCIVDLKGWGYSNCDIRAYIAAIEIMQNYYPERLGKALMIHVPYMFMKAWKMIYPFIDNVTRDKFVFVDDKSLQEVLHQEIDDSQIPDTLGGKLAPVSLKNNARINLD

SEQ ID NO: 22875 - protein, 259 aa, Oryza sativa
MDYCKQQERDGHRDDGDVTEWKKVAELRAVVEAQDPACKEEDDYQLRRFLRARDHNIGKASAMLVKYLQWKREVKPGGRAIADEEVRGELAQEKLYMQGYDRQGRPLVYGFGARHFPARRDLDEFKRYVVYVLDRTCARLDGGQEKFAAVADLQGWGYYGNCDIRAYVAALEIMQNYYPERLGRVFLIHVPYVFMAAWKIIYPFIDDNTKKKFVFVADKDLHATLRDAIDDSNLAEDYGGKLKLVSPLINGATESNRRR

SEQ ID NO: 22876 - protein, 247 aa, Oryza sativa
MAGNRGGDAGEGEWLKVAELRATVEAQDPHAKEVDNLTLRRFLRARDHNVEKASAMLLKALRWRREAVPGGSVPEEKVQSDLDDDKVYMGGADRTGRPILLAFPAKHFSAKRDMPKFKSYCVYLLDSICARIPRGQEKFVCIVDLKGWGYSNCDIRAYIAAIEIMQNYYPERLGKALMIHVPYMFMKAWKMIYPFIDNVTRGKFVFVDDKSLQEVLHQEIDDSQIPDTLGGKLAPVSLKNNARINLD

SEQ ID NO: 22877 - protein, 318 aa, Oryza sativa
  unsure (1)..(318): unsure at all Xaa locations
MGAASDDAVKQLALLMDQXNVHQGYPKETLLRFLKAREWNVSKAHKMLVDSLNWRIQNEIDTVLERPIVPVDLYRSIRDSQLVGLSGYTKEGLPVFAVGVGQSTYDKASVHYYVQSHIQINEYRDRVILPMLTEKFGRPVTTCVKVLDMTGLKLSALSQMKMLTSISTVDDLNYPEKTETYYVVNVPYIFSACWKVVKPLLQERTKKKVKVLHGCGRDELLKIMDYSSLPHFCRREGSGSSKHSSTDADDCYSLDHPFHKELYGHIEELASCKELIKMGSLHVSIPEPDPDDAKIVEVIQAEFQKIGEQNGSANGHKV

SEQ ID NO: 22878 - protein, 336 aa, Oryza sativa
  unsure (1)..(336): unsure at all Xaa locations
MAAASEEAIKQFSALMELLDEPLKTTFQHVHQGYARGTLVRFLKAREWNVPKAHKMLMDCLNWRIQNGIDSVLAKPIVPSDLYRTIRDTLLVGLTGYSKQGQPVYAFGVGLSTLDKASVHYYVQSHIQMNEYRDRVVLPKASKMFGKQINTCLKVMDMTGLKLSALNQIKMLSTITAIDDLNYPEKTETYFIVNAPYVFSACWKVVKPLLQERTKRKIKVLYGSGRDELLKVMDYEALPNFCKREGSGSSNDSSDGVXXCYSYDHPFHQELYNYIKQQALNEDFIGPIKQGSMHVDVPTPDLEEAKIMETIESELHKFSGANGLSHSFNKIKIEGP

SEQ ID NO: 22879 - protein, 242 aa, Oryza sativa
  unsure (1)..(242): unsure at all Xaa locations
XTRPPACSIAAKRHVDQSTTILDVSGVGYKNFNKAARDLIGRLQKVDGDNYPETLCRMFIINAGQGFRLLWNTVKSFLDPKTTAKIHVLGNKYQSKLLEVIDPSELPEFLGGTCTCEGGCMRSDKGPWKDPEIIKMVQCGMGRCGFNSSGHTEADEKMITEDDIVALPKKQESIRRDSVDSPKIPREKIEHPHAEKLALARDMYASLPDAYKHGDAGDRQVVTGFMAFVMGVVAMFRVGKIX

SEQ ID NO: 22880 - protein, 327 aa, Oryza sativa
MGAASDDAVKQLALLMDQVEAPLRRTFQNVHQGYPKETLLRFLKAREWNVSKAHKMLVDSLNWRIQNEIDTVLERPIVPVDLYRSIRDSQLVGLSGYTKEGLPVFAVGVGQSTYDKASVHYYVQSHIQINEYRDRVILPMLTEKFGRPVTTCVKVLDMTGLKLSALSQMKMLTSISTVDDLNYPEKTETYYVVNVPYIFSACWKVVKPLLQERTKKKVKVLHGCGRDELLKIMDYSSLPHFCRREGSGSSKHSSTDADDCYSLDHPFHKELYGHIEELASCKELIKMGSLHVSIPEPDPDDAKIVEVIQAEFQKIGEQNGSANGHKV

SEQ ID NO: 22881 - protein, 311 aa, Oryza sativa
MGAAACDAAVEELTRLLDQVEEPLKQTFQNVHQGYPTDTLVRFLKAREWHVSKACDMLVDSLNWRIQNEIDSILEKPIIPVDLYRSIRETQLVGLSGYSKEVHYYVQSHIQINEYRDRIVLPMASKKFGRPISTCIKVLDMTGLKLSALNQMKILTAISTVDDLNYPEKAETYYIVNAPYIFSACWKVVKPLLQERTRKKVHVLHGCGRDELLKIMDHSSLPHFCQREGSGSSKNSSNDVNNCFSLDHPFHQELYHYIDEQALNQELIKQGSLHVNIPDQDPEDAKIVEVIEAEFHKLGEQNGSVNGEHKE

SEQ ID NO: 22882 - protein, 346 aa, Triticum aestivum
  unsure (1)..(346): unsure at all Xaa locations
PAGSGSSLGETRPDSCPETKQDGHAGYLTEDQTAKLEQFRMMLESEGCTDRLDTLTLLRFLRARKFDVEASKAMFLDTEKWRKETKLDETVPVWDYPEKAEINKYYTQFYHKTDKDGRPIYIETLGGIDLNAMYKITTAERMLTNLAVEYERVADPRLPACSRKAGHLLETCCTVMDLKGVSIGKVPQVYSYVKQASVISQNYYPERLGKLYMINAPWGFSTVWSIVKGWLDPVTVSKINILGSGYKGELLKQIPAENLPKAFGGEXXQCEGGCENSDAGPWHEAEFARPAWWEKKQDANVIENKGSEIEEPAKAPEAAPVAEGADATQTAPAPAPAAAXRIGGDA

SEQ ID NO: 22883 - protein, 284 aa, Triticum aestivum
  unsure (1)..(284): unsure at all Xaa locations
XLFARNLLPXKHDDYHMMLRFLKARKFDVEKAAQMWDEMLQWRNEFGTDTILEDFEFHELEEVLQYYPQGYHGVDKDGRPVYIELLGKVEPNKLVQTTTVERYIKYHVQEFERAFREKFPACSIAAQKHIDTTTTILDVHGVGWKNFGKIARDLVRCMQKIDGDYYPETLHQMFIVNAGAGFKLIWSTIKGLLDPKTSSKIHVLGAKYQSRLLEAIDASQLPEFFGGLCTCSNQGGCLRSNKGPWSDPLIMKXSYIAWNHLHXGISCKYRYRRHSYRLCKIACA

SEQ ID NO: 22884 - protein, 345 aa, Triticum aestivum
  unsure (1)..(345): unsure at all Xaa locations
MSGHLDRLARPVSGFEGCSSHDDRRSYERRSDFEISEDEKKTRMGSLKKKAIDASSKLRHSLKKKNRRKSGSRVLSVSIEDVRDLGELEEVEAFRQALILDELLPSRHDDYHMLLRFLKARKFDIEKAKQMWTDMLQWRKEYGTDTIVEDFDYTELDTVLEYYPHGYHGVDKEGRPVYIERLGKVDPNKLINVTTMDRYVRYHVKEFERSFLIKFPACSLAAKRHINSSTTILDVQGVGLKNFSKTARELIMRLQKVDNDNYPETLHQMFIVNAGPGFRMLWSTVKSFLDPKTTSKIHVLGNKCQSKLLEIIDASELPEFLGGTCTCPEYGGCLKAEKGPWKDAX

SEQ ID NO: 22885 - protein, 383 aa, Triticum aestivum
  unsure (1)..(383): unsure at all Xaa locations
APPTRTVAAAAAPPPPPPPDPKSAGKKIPRGVKFSARGPLSRPGVSLGRGIAEPEGVSGPLDRLARPSFEGFTHNDGKKESRSDADNSEGEKKTKIASFKKKAINAGNKFRHSLRRRSKKKNDNQISIEDIRHVQDLQAVEAFRQCLLDEDLLPQQHDDYHMMLRFLKARKFDVEKAKLMWSDMLTWRKEFGTDNIEEFDNAELNEVMKYYPQFYHGVDKDGRPVYVELIGKVDANKVLQVTTIDRYVKYHVEKFXKCVXVRFPAWTLAAGRTLNSCTTILDVQGVGLKNFSKCARELITRLQKIDSDNYPETLCGTYIINAGQGFKMLWGTIKSFLDPKTASKIHVLGTKYQNKLLEIISEIELPESIGGKCMFKNTQVVRD

SEQ ID NO: 22886 - protein, 563 aa, Triticum aestivum
  unsure (1)..(563): unsure at all Xaa locations
RAYQTWAEVLSGPPEHHLSSALDTHYEEKRKSHVEYSEDEKKAMXVSLKKKAMNASQKLRHSMKKXRRSSKVMSISIEDERDPEEVQAVDAFRQLLVLEELLPSQHDDYHMMLRFLKARKFDVEKAKQMWSDMLQWRKEFGTDTLLEGFEFEEADKVAECYPQGYHGVDKEGRPVYIERLGQIDVTKLMQVTTMERFVKNHVKEFEKNFADKFPACSVAAKRHIDQSTTILDVQGVGMKQFSKAARDLIGQLQKIDGDNYPETLGNKYQSKLLEVIDASELPEFFGGTCQCQGGCMTADKGPWKNPEVMKMVHSGAGRCGKLNLESLDAGEKMICADNTVYTKKQDPXXNGQDEWRNPARAQIEHPQLSPVHEELLPALFPNPGSPYSCDVPMVEKAIDAICKSHGLTDDNLALTKAVANASNASNPPMMGGIMALVMSIATMLRLSRNMPRKVIGAAIGAQSTPKTQAQQQSKXXLAEAEYTVSAKRFADLEEKIIALLAKQAEMPADKEELLKAATSRVAALEEELARTNKALQETLERQQEIMEYIEKKKKKKKKQKFHW

SEQ ID NO: 22887 - protein, 396 aa, Triticum aestivum
  unsure (1)..(396): unsure at all Xaa locations
ARPIKTVRHEEASPPPPPPAPKSAPKFRNREVKISAGNEIPRLFASYAPGTDSGPGASLGRSIPEPEGMSGPLDRLATSFEGFTHNDGKKESRSDADNSEGEKKTKIASFKKKAINAGNKFRHSLRRRSKKKNDNQISIEDIRHVQDLQAVEAFRQCLLDEDLLPQQHDDYHMMLRFLKARKFDVEKAKLMWSDMLTWRKEFGTDNIEEFDYAELNEVMKYYPQFYHGVDKDGRPVYVELIGKVDANKVLQVTTIDRYVKYHVKEFEKCFQMRFPACPIAAKRHLDSCTTILDVQGVGLKNFSKCARELITRLQKIDSDNRPASVRPSXXIINAGQGFKMLWGTIKSLLDPKTASXIHVLGTKYHYKLLEIIDGGXELPESIGGKCMFKNTQVVRD

SEQ ID NO: 22888 - protein, 230 aa, Triticum aestivum
  unsure (1)..(230): unsure at all Xaa locations
RGSRXFVFEELDEVLSYYPQGYHGVDRQGRPVYIERLGKVDPNKLMNITTVDRYIKYHVQEFERAFLDKFPACSIAAKRHIGSTTTILDVEGVGFKNFSKTAREMLTRMQKIDSDYYPETLHQMFVVNAGGGFKLLWNSVKGFLDPKTVSKIHVLGTKFQSKLLEVIDGSQLPEFLGGTCTCAGEAGCLKSNKGPWNDPNIMKVAHNKEAKFSRHTRRLSEIEQRRGSFX

SEQ ID NO: 22889 - protein, 268 aa, Zea mays
  unsure (1)..(268): unsure at all Xaa locations
SLYSAVFLTAVSFSFSPPPSSTPPSTNYPSQWPRTPSTITXDFPAQGAEKQDGHAGYLTEDQTAKLEQFRMMLESEGCTDRLDTLTLLRFLRARKFDVEASKAMFLDTEKWRKETKLDETVPVWDYPEKAEINKYYTQFYHKTDKDGRPIYIETLGGIDLNAMYKITTAERMLTNLAVEYERVADPRLPACSRKAGHLLETCCTVMDLKGVSIGKVPQVYSYVKQASVISQNYYPERLGKLYMINAPXWGFSTVWSIVKGWLDPVTVX

SEQ ID NO: 22890 - protein, 591 aa, Zea mays
  unsure (1)..(591): unsure at all Xaa locations
MSATIDRLATPSHEGRAHSDEKRECNSDEENSEGERKPKKDSFKKRAVTTGYRFRHSLRRKSKTKNDNHIASIEDIRDVQELEIVERFRQCLLDDGLLPEHHDDYHTMLRFLKARKFNIDKAKHMWSEMLRWRKEFGADNIEEFDYTELDEVVKYYPQFYHGVDKDGRPVYIELIGKVDTNKLVQITTIDRYLKYHVKEFERCLQMRFPACSIAAKRHIDSSTTILDVKGVSLKNFTKDARELIMRLQKINNDNYPETLYQLYIINAGQGFKILWGTIKSFLDPETASKIHVLGNKYQTKLLEIIDGSELPEFLGGKCRCEEYGGCPKSDKGPWKDPEIFKRVINGEANYGRQVLAVSSINQKEVGXXTEHTTVEDVSSSTALVDPIISPNLTHVDELKFQGHASSSDAPPIIGDSIPAAGKVMDACSNPRNSSTPSSSGSFSLRNIPATLGGLKTRIVAWSTFVILTLSAFLCSVLSIVTKRXXQTRPSHVTTIVXDFHQGYMGNGTLTSVLTRLGELEEKVQALEAKPPQVPFEKEELLHTAVYRVDVLEAELISMKKALYETLIRQDELLAYIDQQQTAKFCRQKFCF

SEQ ID NO: 22891 - protein, 552 aa, Zea mays
  unsure (1)..(552): unsure at all Xaa locations
XELQAVEAFRQALLLDELLPARHDDYHMMLRFLKARKFDIDKAKQMWMDMLHWRREYGTDTILEDFDYTELDTVLQYYPHGYHGVDKEGRPVYIERLGKVDPSKLMNVTTMDRYVRYHVKEFERSFLIKFPACSVAAKRHIDSSTTILDVQGVGLKNFSKTARELIQRLXKIDNDNYPETLYQMFIVNAGPGFRLLWNTVKSFLDPKTTAKIHVLGNKYQSKLLEIIDASELPEFLGGTCTCPEYGGCLKAEKGPWKDPNILKIVQSGEVHCARQIVTISNGEEKFITYAKPKHHSMRGSDTSTAESGSEADDAISPKALRSYIQHPKLTPVREEVKIVRATSFSIRLPEYDVPVVDKAVDATWRREQPRKIPFMPQDADSSVKTMSRPSDSSCKIVATLMACLMAIVMLVRLVKDLVTRRLPYKGGSEEIHSTLYPDPIQKEEFRPPSPIPGFAEADLFAVVLQRLGELEEKVQMLQEKPSEMPCEKEELLNAAVRRVDALEAELIVTKKALHEALIRQEELLAYIDRKEIAKAQWSCFLLQRKKKAMLCY

SEQ ID NO: 22892 - protein, 705 aa, Zea mays
  unsure (1)..(705): unsure at all Xaa locations
TPTKREASSSPCPRACVRAWPEAGWEEDLTPSRVAVLGAAARDRGPTRLPPPLGTRSSWRSCTCRLPVLCNLQNVSASSVNXSMEGLLTLDDWKERRSDVDNSEDERRRLSIGSLKKKALNASNKLTHSLKKRGKRKVEHRASSFTIEDVRDEQEERAVFTFQQKLLDMNLLPDKHNDYHSLLRFLKARKFDTEKAIHMWAEMLQWRKESGADTILEDFSFEELDDVLCYYPQGYHGVDRQGRPVYIERLGKVEPNKLMHITTVDRYMKYHVQEFERAFRDRFPACSVAAKRHIDSTTTILDVDGVGLKNFSKTARDMLSRMQKIDSDYYPETLHQMFVVNAGSGFKLLWSSVKGFLDPKTASKIHVLGTKFQNKLLEVIDASQLPEFLGGTCTCAAVGGCMRSNKGPWNDPDIMKLAHNKEAKFTRHTRRLSEIEQGRSSFARLHLLKGRNSDTSTVESGSEIDDLGAPIMRSTVGCSRLAPVREEMQMRARDSAAYYSCDDHFVVVDKTVDYGRGGSPSDKSSASEVRTHVRPLDASXSSPRGRSLKXXRRATVVPEEVSDEGVFRRFVRLLLAXXIVKVFAFFHIVRSQQETRVNNLLPPAEPELISDDHPAVETFKDHISPVIERLQRLEGKVDELGSKPPAIPVEKERSLLESWDRIKCIESDLERTKKVLQATVRKQLESAESLEEVIRSSLPRRRFCL

SEQ ID NO: 22893 - protein, 359 aa, Zea mays
  unsure (1)..(359): unsure at all Xaa locations
MSVSHADEHEISLCDPSSEDDRRRRKIGSLPLKAIHALRKKRARRRVTDFRFPAAISIEDVRDAEEERAVAAFRDRLAAHRLLPDKHDDYHMMLRFLKARKFDSDKAMQMWSEMLRWRKEFGTDTILEDFEFDELNDVLHYYPQGYHGVDREGRPVYIERLGKVDPNKLMQITSVDRYIKYHVQEFERAFRERFPACTLSAKRHIDSTTTILDVHGVGFKNFSKTARELVQRMQRIDSDYYPETLHQMYVVNAGSGFKLIWNSVKGFLDPKTSSKIHVLGSNYQSRLIEVIDSSELPKFLGGSCTCSEKGGCLRSNRGPWNDPVIMKKSTDHSLLTPVHEEVKGSDTSIXFVVLAVSIS

SEQ ID NO: 22894 - protein, 639 aa, Zea mays
  unsure (1)..(639): unsure at all Xaa locations
MSGHLDRFARPCFEGRSSHDECRDHKSDFEVSEDEKKTRMGSLKKKAIDASTKIRHSLKKXXRRKSGSRVLSVSIEDVRDLEELQAVEAFRQALLLDELLPARHDDYHMMLRFLKARKFDIDKAKQMWMDMLHWRREYGTDTILEDFDYTELDTVLQYYPHGYHGVDKEGRPVYIERLGKVDPSKLMNVTTMDRYVRYHXVKEFERSFLIKFPACSLAAKRHIDSSTTILDVHGVGXLKNFSKTARELIQRLQKIDNDNYPETLYQMFIVNAGPGFRLLWNTVKSFLDPKTTAKIHVLGNKYQSKLLETIDASELPEFLGGTCTCPEYGGCLKAEKGPWKDPNILKIVQSGGFHCARQIVTISNGEEKFITYAKPKRHTMRGSDTSTAESGSEADDAVSPKALRSYISHPKLTPVREEVKMFRATSFSTRLPEYDVPVVDKAVDATWKREQPRKAPSVPQDADSSVKTASKPSGRPCKIAATLMACLMAIVMLVRSVKDLATMRLSSKGGSEESYCTLYPDSVQKEEFRPPSPFPGFAEADLFAVVLQRLGELEEKVQMLQEKPSEMPCEKEELLNAAVRRVDALEAELIVTKKALHEALIRQKELLANIDSKEIARAQVPXCYIMMFSYPCYNPCISL

SEQ ID NO: 22895 - protein, 639 aa, Zea mays
  unsure (1)..(639): unsure at all Xaa locations
ENESDRPEVAAVPRRGERTGGHGRRRPGAIPPGRDPAAEESGHFARRRRTRTAGDLAPRVAAQLQRHTTVPAVPGAVRSSHLPLCLPALPVVSHAEDIEISLCDGNSEDERRRRKIGSLRRKAIHALKKRGRRRVDFRFPAGXAISIEDVRDAEEERAVASFRDRLAAHGLLPDKHDDYHMILRFLKARKFEADKAMQMWSEMLKWRKEFGTDTILEDFDFAELDDVLRYYPQGYHGVDREGRPVYIERLGKVDPNKLMQITSVDRYIKYHVQEFERAFRERFPACTLAAKRHIDSTTTILDVQGVGFKNFSKTARELVHRMQKIDSDYYPETLHQMFVVNAGSGFKWIWNSVKGFLDPKTSSKIHVLGSNYQSRLLEVMDSSELPEFLGGSCTCSDKGGCLGSNKGPWNDPYILKKVSDYGCLTPVHEEVKGTDRVTYFSYDDQSHPDMAPESYHGARRATGMEHHKPMADFSQYSANRRPGNSALNVNGTAAQSGWENVVKLVVTTLVKLFYFIRLFLSTAERRLESIHRPAPPAAPAAAEEPRPRAISDEEVCACLQRLDNLESMCSHLAAKPPQIPEDKELILLSSFERIRSVEADLERTKRVLNATVVKQKALVETLESVQESSSRVKKRMFCS

SEQ ID NO: 22896 - protein, 436 aa, Zea mays
  unsure (1)..(436): unsure at all Xaa locations
MSATIDRLATPSHEGRAHSDEKRECNSDEENSEGERKPKKDSFKKRAVTTGYRFRHSLRRKSKTKNDNHIASIEDIRDVQELEIVERFRQCLLDDGLLPEHHDDYHTMLRFLKARKFNXVDGAKQMWSEMLRWRKEFGADDIEEFDYTELDEVVKYYPQLYHGVDKGGRPIYIELIGKVDTYKLVQITTIDRYIKYHVKEFERCLQMRFPACSIAAKRHIDSSTAILDVKGVGLKNFTKVARELIMRLQNINNNNYPETLQQLCIINAGQGFKMLWGTIKSFLDPETASKIHVLGNKYQTKLLEIIDDSELPEFLGGKCRCEEYGGCLKSNKGPWKDPEIVKKVINGEANYVRQVIAVSNINQKEVSCTEHSTEEKVNDASVESISEVEDVSSSTALMDHIISPNLTFVDESKFRGHAXSSDAPXXIRGSXPVASX

SEQ ID NO: 22897 - protein, 629 aa, Zea mays
  unsure (1)..(629): unsure at all Xaa locations
MSGHLDRFARPCFEGCSSHDERRDHKSDFEVSEDEKKTRISSLKKKAIDASTKIRHSLKKXXRRKSGSRVLSVSIEDVRDLEELQAVEAFRQALLLDELLPARHDDYHMMLRFLKARKFDIDKAKQMWIDMLQWRREYDTDTIVEDFEYTELSTVLQYYPHGYHGVDKEGRPVYIERLGKVDPSKLMNVTTMDRYVRYHVKEFERSFLIKFPACSLAAKRHIDSSTTILDVHGVGXLKNFSKTARELIQRLQKIDNDNYPETLYQMFIVNAGPGFRXLLWNXTVKSFLDPKTTAKIHVLGNKYQSKLLETIDASELPEFLGGTCTCPEYGGCLKAEKGPWKDPNILKIVQSGGVHCARQIVTISNGEEKFITYAKPNRHAMRGSDTSTAESGSEADDAVSPKALRSYISHPKLTPVREEVKMVRATSFSTRLPEYDVPVVDKAVDATWKREQPRKAPFVPQDADSSVKTASKPSGRPCKIAATLMACLMVIVMLVRSVKDLATMRLSSKGGSEESYCTLYPDSVQKEEFRPPSPFPGFAEADLFAVVLQRLGELEEKVQMLQEKPSEMPCEKEELLNAAVRRVDALEAELIVTKKALHEALIRQEELLANIDSKEIARAQRKKKTMFCY

SEQ ID NO: 22898 - protein, 558 aa, Zea mays
  unsure (1)..(558): unsure at all Xaa locations
MSVSHAQDIEISLCDGNSEDERRRRKIGSLRRKAIHALKKRGRRRVDSRFPPPAISIEDVRDAEEERAVASFRERLAAHGLLPEKHDDYHMMLRFLKARKFEAEKAMQMWSEMLKWRKEFGTDTILEDFDFEELDDVLRYYPQGYHGVDRQGRXVYIERLGKVDPNNLMQITSVDRYIKYHVQEFERAFRERFPACTLAAKRHIDSTTTILDVQGVGFKNFSRTARELVNRMQKIDSDYYPETLHQMFVVNAGSGFKWIWNSVKGFLDPKTSSKIHVLGSNYQSRLLEVIDSSELPEFLGGSCTCSDKGGCLGSNKGPWNDPYILKLIHNLEAGCMRETTKPVSEGGERSSSSFRLEQMKWQGMLSDTSNAESGSDVDDFGPSFVHKVSGYGCLTPVREEVKGTDCATYLSCDDQSHPDMVPEFYHGVQRTTEMVQKQMADFRQYSTNRRPSELGNGSLNANGTAAAQRGWEDVAKLVVTALIKLFSFIRLFLSRAAESRLEKVRRTAPPPAAEKPRPRAISDEEVCACLQRLDNLESMCSHLAAKPRRSQRTRNSFC

SEQ ID NO: 22899 - protein, 619 aa, Zea mays
  unsure (1)..(619): unsure at all Xaa locations
MSAPLDRLARPCFEGFVHNDERKESRSDADNSEGDKKTKIGSFKKKAINAGNKFRHSLRRRSKKKTERGDSIKDIRDIKELQDVETFRQCLIDEDLLPPQHDDYHMMLRFLKARKFDVEKAKNMWSDMLKWRKEFGVDKIEEFEYAELDEVKKYYPQFYHGVDKEGRPVYIELIGKVDANKLVQVTTLDRYVKYHVKEFERCFQIRFPACSIAAKKHIDSSTTIFDVQGVGFKNFSKSARELITRLQKIDNDNYPETLCQMYIINAGQGFKMLWSTIKSFLDPKTASKIHVLGNKYQHKLLEIIDECELPEFLGGKCKCIXXGCERSDKGPWKDPNIIKRVLNGEANYGRQIVTISSTDGRIVSYAWPVHPNRKGSDASAESGSEVEDVTSPTASRNLITHPILTPVHEESKLSAHGSSSVVHASIGENIPVVDKIVDDGWGSPRSSPQAASSGSLSLRNLHGTFQGLRAQTITWLTFLMMTLFAMLCSVPSKMARRISNQSGKHDDYHVKYPQEQECKEEFRPPSPAPSYTEKDVISSMLRRLGELEDKVQVLETKPSEMPFEKEELLNAAVRRVDALEAELISTKKALYDALMRQDELLAYIDRQELIKFRKKKFCF

SEQ ID NO: 22900 - protein, 293 aa, Zea mays
MSFRSIEQLLRRNSKTKISRNIVDRNHDQKEEQLVQSLRELLLASKQLPDKFDDYYVLLRFLKMRGFNILKAKEMFLNMLKWREDCSVDAIANDFKFEEYDAVKRCYPHGFHGVDRFGRPLYIERVGSVDLSKLMQVTTIDRYVKYHISEQEKTISLRYPVCSLVAKKHIASTTAIFDVKGLGLNNFSKSAREMFAEIQKIDSNYYPETLNQLYIINAGTGFRALWKVLKTFMEARTLAKIQVLGTNYLNTVLEAVDPSNLPEFLGGTCTCPTGGCLLQDKGPWTDPAVKKKK

SEQ ID NO: 22901 - protein, 373 aa, Zea mays
  unsure (1)..(373): unsure at all Xaa locations
EQSIVSLLLDREPHSLGVRVVAXGSEIGIPTEELHPRTSEKGMSATIDRPTPSHEGRAHSDEKRECNSDEENSEGERKPKKDSFKKRAVTTGYRFRHSLRRKSKTKNDNHIASIEDIRDVQELEIVERFRQCLLDDGLLPEHHDDYHTMLRFLKARKFNIDKAKHMWSEMLRWRKEFGADNIEEFDYTELDEVVKYYPQFYHGVDKDGRPVYIELIGKVDTNKLVQITTIXDRYLKYVVREFERCLQMRFPACSIAAKRHIDSSTAILDVKGVGPKNFPKVARELIMRLQKINHGHYPETLQQLCIINAGQGFKMLWGTIKSFLDPETASKIHVLGNKYQTKLLEIIDDSELPEFLGGKCRXLLLAVKSMEVV

SEQ ID NO: 22902 - protein, 619 aa, Zea mays
  unsure (1)..(619): unsure at all Xaa locations
MSGPLDRFARPCFEGFVHNDERKESRSDADNSEGDKKTKIGSFKKKAINAGNKFRHSLRRRSKKKTERGDSIKDIRDVKELQDVETFRQCLIDEDLLPPQHDDYHMMLRFLKARKFEVEKAKSMWSDMINWRKEFGVDKIEEFDYTELDEVTEYYPQFYHGVDKEGRPVYIELVGKVDANKLIQVTTLDRYVKYHVKEFEKCFQMKFPACTIAAKKHIDSSTTILDVQGVGFKNFSKSARELITRLQKIDSDNYPETLCRMYIINAGQGFKMLWSTIKSFLDPKTASKIHVLGNKYQHKLLEIIDECELPEFLGGKCNCIXXGCQRSDKGPWKDPNIIKRVLNDEANYGRQIVTISSIDGKIIRYARPDHPTRKGSDASAESGSEVEDVTSPTASRNLITHPILTPVHEESKLSPHGSTFVAHASIEENIPVVDKVVDDGCTPRGSLQASSGSLPSRXXTHGTFEGLRVQAVAWLTFLITALFATLCSVPSKMARRISSQSSKHDDYRGEYPQEEEEHKEEFRPPSPAPSYTEKDVLSSMLRRLGELEGRVQVLETKPSEMPFEKEELLNAAVRRVDALEAELISTKKALYDALMRQDELLAYIDRQELIKFRKKKFCF

SEQ ID NO: 22903 - protein, 567 aa, Zea mays
MAEVLSGSHEHRLSSALDGHYDEKRKSNVEYTEDEKKAVIAALKKKALSASQKFRHSMKRGRKSSKVMSISILDEREPEEVQAVDAFRQLLVLEELLPSQHDDYHMMLRFLKARKFDIEKAKQMWSDMLKWRKEFGADTILEEFEFEEADKVAECYPQGYHGVDKEGRPVYFERLGQIDVNRLMQVTTMDRFVKNHVKEFEKNFAVKFPACSIAAKHHIDQSTTILDVQGVGMKQFSKAARELIGMLQKIDGDNYPETLGNKYQSKLLEVIDASELPEIFGGTCRCEGGCMKADKGPWKDPEIMKMVQSGDGRCGSLGTASFEAPEKMICEDDTYPKKQALFDGETQLAGDEHSQSQKISRGRIEHPHVSPLHEELIPTSIHTPGSPYSCDVPMVEEAIDAICKSHGTPPDEKIAITKAIINVSNGSKPPLFAGIIALVMSIATMVRLTRSMMPGKVLGAAIGAEGKSKVQERQRSKLSEEAVEEAEDAVSAKRLSELEEKVIALLTKPASMPADKEEVLQAAVSRVSALEEELAATKKTLQETLERQLEIVAYIEKKKKSKRFFRW

SEQ ID NO: 22904 - protein, 591 aa, Zea mays
  unsure (1)..(591): unsure at all Xaa locations
MSASFGRLAPPRHKGRAHRDEKRXRCSEEGNXEEERKPKXDSCKQRAVTTGYNFTHSLRTXRKKGYQTRPAHVTTIVLTSMKDIWEMAPLHPYXHGLVSWRRRYKHLKQSHPKCHLLRRDSYIQMWSELLRWKLNFSIKKTLNXXHSFVDEVVKYYPQFYHGVDKDGRPVYIELIGKVDTYKLVQITTIDRYLKYHVKEFERCLQMRFPACSIAAKRHIDSSTTILDVKGVSLKNFTKDARELIMRLQKINNDNYPETLYQLYIINAGQGFKILWGTIKSFLDPETASKIHVLGNKYQTKLLEIIDGSELPEFLGGKCRCEEYGGCPKSDKGPWKDPEIFKRVINGEANYGRQVLAVSSINQKEVGXXTEHTTVEDVSSSTALVDPIISPNLTHVDELKFQGHASSSDAPPIIGDSIPAAGKVMDACSNPRNSSTPSSSGSFSLRNIPATLGGLKTRIVAWSTFVILTLSAFLCSVLSIVTKRXXQTRPSHVTTIVXDFHQGYMGNGTLTSVLTRLGELEEKVQALEAKPPQVPFEKEELLHTAVYRVDVLEAELISMKKALYETLIRQDELLAYIDQQQTAKFCRQKFCF

SEQ ID NO: 22905 - protein, 445 aa, Zea mays
  unsure (1)..(445): unsure at all Xaa locations
ERRRAARAGPPRRAXFSAQATHEDFDFAELDDVLRYYPQGYHGVDREGRPVYIERLGKVDPNNLMQITSVDRYIKYHVQEFERAFRERFPACTLAAKRHIDSTTTILDVQGVGFKNFSRTARELVNRMQKIDSDYYPETLHQMFVVNAGSGFKWIWNSVKGFLDPKTSSKIHVLGSNYQSRLLEVIDSSELPEFLGGSCTCSDKGGCLGSNKGPWNDPYILKKVSDYGCLTPVHEEVKGTDRVTYFSYDDQSHPDMAPESYHGARRATGMEHHKPMADFSQYSANRRPGDSALNVNGTAAQSGWENVVKLVVTTLVKLFYFIRLFLSTAERRLESIHRPAPPAAPAAAEEPRPRAISDEEVCACLQRLDNLESMCSHLAAKPPQIPEDKELILLSSFERIRSVEADLERTKRVLNATVVKQKALVETLESVQESSSRVKKRMFCS

SEQ ID NO: 22906 - protein, 330 aa, Zea mays
  unsure (1)..(330): unsure at all Xaa locations
ALGDEAPREASRSHQTLRAAAPSLLIVISGQWIDLTSEATFLGAPPPSEPSRSDPDPVLGLPCAPNQXSGSVIQRGSAWSSELVLYRMSEGNVDSIQISVSNDERRNRADAEISEDEPRHTRMRSLKKKALHASTRLTHSLKKRGKRKVDCRVPRIAIEDVRDAEEEQAVNSFREVLFARGLLPVKHDNYHTMLRFLKARKFDFEKAAQMWADMLQWRKEFGTDTIFEDFEFHELEEVLQYYPHGYHGVDKEGRPVYIELLGKVEPNKLMQITTVERYIKYHVQEFERVFREKFPACSISAKRHIDTTTTILDVHGVPKKNHQXSCRSTX

SEQ ID NO: 22907 - protein, 189 aa, Zea mays
  unsure (1)..(189): unsure at all Xaa locations
XPGSTHASGDAEEMKSVDAFRQTLVLEELLPARHDDYHMMLRFLRARKFDIDKSKQMWSDMLQWRKEFGSDTILDDFQFEEMDQVLEHYPQGHHGVDRDGRPVYIEKLGAIDTAKLLQVTSMDRYVKYHVREFERAFAVKFPACSIAAKRHVDQSTTILDVSGVGYKNFNKAARDLIGRLQKXDGDNYX

SEQ ID NO: 22908 - protein, 334 aa, Zea mays
  unsure (1)..(334): unsure at all Xaa locations
RLLRSPRPQRRILRDARAPVSAPCPPPTLPHPRLPAKIDQGSDALRQGLPAGGRPCAGATSRQRALEPPELLLTTHGNLPSVTATENADALLGQGLLVARLKPHRLLQDFVFDELDDVLRYYPQGYHGVDRESQPVYIEKLGKVDPNKLMQITSVDRYIKYHVQEFERAFRERFTACTLAAKRHIDSTTTILYVQGAGFKNFSRTARELVNRMQKIDSDYYPETLHPMFVVNAGSGFKWIWNSVKGFLDPKSSSXIHVLGSKYQSRLLEVIDSSELPEFLGGSCTCSDKGGCLGSNKGPWQPPLVVHAHVGQGWLPWIEQRAMEXSLYIEADPX

SEQ ID NO: 22909 - protein, 248 aa, Zea mays
  unsure (1)..(248): unsure at all Xaa locations
MSVSHAQDIEISLCDGNSEDERRRRKIGSLRRKAIHALKKRGRRRVDSRFPPPAISIEDVRDAEEERAVASFRERLAAHGLLPESEKHDDYHMMLRFLKARKFEAEKAMQMWSEMLKWRKEFGTDTILEDFDFEELDDVLRYYPQGYHGVDRQGRPVYIERLGKVDPNNLMQITSVDRYIKYHVQEFERAFRERFPACTLAAKRHIDSTTTILDVQGVVCERFSLSCANRTQICSVXXSFFLIWLYSA

SEQ ID NO: 22910 - protein, 279 aa, Zea mays
  unsure (1)..(279): unsure at all Xaa locations
KFRLLVHGSSITVLFSQMAGCSCRRFXARVLFRGRIPVPADGMSGPLDRFARPCFEGFVHNDERKESRSDADNSEGDKKTKIGSFKKKAINAGNKFRHSLRRRSKKKTERGDSIKDIRDVKELQDVETFRQCLIDEDLLPPQHDDYHMMLRFLKARKFEVEKAKSMWSDMINWRKEFGVDKIEEFDYTELDEVTEYYPQFYHGVDKEGRPVYIELVGKVDANKLIQVTTLDRYVKYHVKEIEKCFQMKFPACTIAAKXHIDSSTTIXLDVQGVGFKNFX

SEQ ID NO: 22911 - protein, 211 aa, Zea mays
  unsure (1)..(211): unsure at all Xaa locations
MSVSHAEDIEISLCDGNSEDERRRRKIGSLRRKAIHALKKRGRRRVDFRFPPAAISIEDVRDAEEERAVASFRDRLAAHGLLPDKHDDYHMMLRFLKARKFEADKAMQMWSEMLKWRKEFGTDTILEDFDFAELDDVLRYYPQGYHGVDREGRPVYIERLGEVDPNKLMQITSVDRYIKYHAQEFERAXFRERVPACTLAGQRHIDSTTTX

SEQ ID NO: 22912 - protein, 251 aa, Zea mays
MANAGGGAAGEGEWLKVAQLRALVQEDHRAKEVDNLTLRRFLRARGHNVDKAAAMLLKFLRWRAEAAPGGGTVREEQVRGELEQDKIYMGGVDRTGRPIIVGLLAKHYSANRDMAEFKSFVVYFFDKICARIPRGQEKFLAIMDLKGWGYANFDVRAYIAAIEIMQNYYPERLGKALMINVPYIFLKVWKTMIYPFIDANTRDKFVFVDDKSLRETLRREIDESQLPEFLGGKMPLVSLKDYAQQPQPVCE

SEQ ID NO: 22913 - protein, 186 aa, Zea mays
  unsure (1)..(186): unsure at all Xaa locations
MSVIHADDIEISLCDGNSEDERRRRKIGSLRRKAIHALKKRGRRRVDFRFPPAISIEDVRDAEEERAVSAFRERLAAHGLLPEKHDDYHMMLRFLKARKFDAEKAMQMWADMLRWRKEFGADTILEDFEFDELDEVLCHYPQGYHGVDREGRPVYIERLGKVDPNKLMQITSVDRYIKYHVQEFXX

SEQ ID NO: 22914 - protein, 184 aa, Zea mays
  unsure (1)..(184): unsure at all Xaa locations
XHPSRRNLVLTXXRGIRLHLKEFERCLQMRFPACSIAAKRHIDSSTAILDVKGVGLKNFTKVARELIMRLQNINNNNYPETLQQLCIINAGQGFKMLWGTIKSFLDPETASKIHVLGNKYQTKLLEIIDDSELPEFLGGKCRCEXDGRCLKSNKGPWKDPDIVKVINGEADYVRHVIAVSNINX

SEQ ID NO: 22915 - protein, 251 aa, Zea mays
MANAGGGAAGEGEWLKVAQLRALVQEDHRAKEVDNLTLRRFLRARGHNVDKAAAMLLKFLRWRAEAAPGGGTVREEQVRGELEQDKIYMGGVDRTGRPIIVGLLAKHYSANRDMAEFKSFVVYFFDKICARIPRGQEKFLAIMDLKGWGFANCDVRAYIAAIEIMQNYYPERLGKALMINVPYIFLKVWKTMIYPFIDANTRDKFVFVDDKSLRETLRREIDETQLPEFLGGKMPLVSLKDYAQQPQPVCE

SEQ ID NO: 22916 - protein, 251 aa, Zea mays
MANAGGGAAGEGEWLKVAQLRALVQEDHRAKEVDNLTLRRFLRARGHNVDKAAAMLLKFLRWRAEAAPGGGTVREEQVRGELEQDKIYMGGVDRTGRPIIVGLLAKHYSANRDMAEFKSFVVYFFDKICARIPRGQEKFLAIMDLKGWGYANCDVRAYIAAIEIMQNYYPERLGKALMINVPYIFLKVWKTMIYPFIDANTRDKFVFVDDKSLRETLRREIDESQLPEFLGGKMPLVSLKDYAQQPQPVCE

SEQ ID NO: 22917 - protein, 251 aa, Zea mays; identical to SEQ ID NO: 22916

SEQ ID NO: 22918 - protein, 300 aa, Zea mays
  unsure (1)..(300): unsure at all Xaa locations
XEKHMISSMLRRIGLVGVSVVRQDFECTELNTILXYYPHGHHGVGKEGRHVYIERLRKVDPRKLMNVTTMDHYVRYHVKEFERSFLIKFLAWSLVAKKHIDFSTTILDVHDMGLKNFSKTARKIIIQRLQKIDNDNYPETLYQMFIINAGPGFRLXWNTLKSFLDPKTTAKIHILGNKYQSKLLEXFDASEMSEFLGGTCTYPEYGGCLKAEKGQWXDPNILKACTNGGVHCARQIVTISNGEEKLVFMQIEVPCMRGSGTSTAESGSEVDDAVSVQALRTXQHPKLTRVREEAKPVDAT

SEQ ID NO: 22919 - protein, 233 aa, Zea mays
  unsure (1)..(233): unsure at all Xaa locations
XALQVTSMDRYVQYHVREFERAFAVKFPACSISAKKHVDQSTTILDVSGVGYKNFNKAARDLIGRLQKIDGDNYPETLCRMFIINAGQGFRLLWNTVKSFLDPKTTAKIHVLGNKYQSKLLEVIDASELPEFFGGTCNCXXGGCMRSDKGPWKDPEILKMVQCGMGRCGMNSGDPRDADEKLITEDEIVPVPKKQDSMRRNAVDSPKVAREKIEHPQMSPLHEMKDASDPDPX

SEQ ID NO: 22920 - protein, 254 aa, Zea mays
MANAGGGAAGEGEWLKVAQLRALVQAQDEDHRAKEVDNLTLRRFLRARGHNVDKAAAMLLKSLRWRAEAAPGGGTVREEQVRGELEQDKIYMGGVDRTGRPIIVGLLAKHYSANRDMAEFKSFVVYFFDKICARIPRGQEKFLAIMDLKGWGFANCDVRAYIAAIEIMQNYYPERLGKALMINVPYIFLKVWKTMIYPFIDANTRDKFVFVDDKSLRETLRREIDETQLPEFLGGKMPLVSLKDYAQQPQPVCE

SEQ ID NO: 22921 - protein, 186 aa, Zea mays
  unsure (1)..(186): unsure at all Xaa locations
MDRYVQYHVREFERAFAVKFPACSISAKKHVDQSTTILDVSGVGYKNFNKAARDLIGRLQKIDGDNYPETLCRMFIINAGQGFRLLWNTVKSFLDPKTTAKIHVLGNKYQSKLLEVIDASELPEFFGGTCNCXXGGCMRSDKGPWKDPEILKMVQCGMGRCGMNSGDPRDADEKLITEDEIVPVPK

SEQ ID NO: 22922 - protein, 336 aa, Zea mays
  unsure (1)..(336): unsure at all Xaa locations
MAATSEEAIKQFSALMEQLEEPLKSTFQNVHQGNLRGTLMRFLKAREWSVPKAYKMLMDCLNWRVQNEIDIVLAKPILPSDIYRVIRDTLLVGLTGYSKQGQPVYAFGVGLSTFDKASVNYYVQSHIQMNEYRDRVVLPAASKKFGRQINTCLKVMDMTGLKLSALSQIKMLTMITTVDDLNYPEKTETYYIVNAPYVFSACWKVVKPLLQERTKKKIQVLYGSGRDELLKVMDYESLPHFCKREGSGSSSDSLDGVXXCYSYDHPFHQQLYNYMKQQQSLNQAVGPRKQGSVHVDVPSPGLEEAKIAETIKAELQNLRGTGGLAHSFSSIQIEGP

SEQ ID NO: 22923 - protein, 336 aa, Zea mays
  unsure (1)..(336): unsure at all Xaa locations
MAATSEEAIKQFSALMEQLEEPLKSTFQNVHQGNLRGTLMRFLKAREWSVPKAYKMLMDCLNWRVQNEIDIVLAKPILPSDIYRVIRDTLLVGLTGYSKQGQPVYAFGVGLSTFDKASVNYYVQSHIQMNEYRDRVVLPAASKKFGRQINTCLKVMDMTGLKLSALSQIKMLTMITTVDDLNYPEKTETYYIVNAPYVFSACWKVVKPLLQERTKKKIQVLYGSGRDELLKVMDYESLPHFCKREGSGSSSDSLDGVXXCYSYDHPFHQQLYNYMKQQQSLNQAVGPRKQGSVHVDVPSPGLEEAKIAETIKAELQNLRGSGGLAHSFSSIQIEGP

SEQ ID NO: 22924 - protein, 336 aa, Zea mays; identical to SEQ ID NO: 22923
  unsure (1)..(336): unsure at all Xaa locations

SEQ ID NO: 22925 - protein, 336 aa, Zea mays; identical to SEQ ID NO: 22922
  unsure (1)..(336): unsure at all Xaa locations

SEQ ID NO: 22926 - protein, 257 aa, Zea mays
MANAGGGAAGEGEWLKVAQLRALVQAQDEDHRAKEVDNLTLRRFLRARGHNVDKAAAMLLKSLRWRAEAAPAGATVREEQVRGELEQDKIYMGGVDRTGRPHLVGLLAKHYSANRDMAEFKSFVVYFFDKICARIPRGQEKFLAIMDLKGWGYANCDVRAYIAAIEIMQNYYPERLGKALMINVPYIFLKVWKTMIYPFIDANTRDKFVFVDDKSLRETLRREIDESQLPEFLGGKMPLVSLKDYAQQPQPVSSESS

SEQ ID NO: 22927 - protein, 251 aa, Zea mays; identical to SEQ ID NO: 672

SEQ ID NO: 22928 - protein, 279 aa, Zea mays
  unsure (1)..(279): unsure at all Xaa locations
PHDPPPTHPPAAEVVGHGGAGAARAGGXRRRGXEWKQVAELRAVTQAQDPSCKDEDDYTLRRFLRARDHNIGKASAMLLKYLKWKPAAKPHGAIAAAEVAREAAQGKLYLQGHDREGRPLIYGFGARHHPARRDLDEFKRYVVHVLDATVARLPRRQEKFAAVADLAGWGYANCDIRGYLAALDIMQSYYPERLARVFLVHVPYVFMAAWKIVYPFIDDNTKKKFVFVPDKDLDRTLREAIDDSQLPEIYGGKLKLVTPAAKLPSHXLGGPVHDDCTSS

SEQ ID NO: 22929 - protein, 286 aa, Zea mays
  unsure (1)..(286): unsure at all Xaa locations
PGDRCTNSSPPSSYKSRVTTRPRQLADVVGHGGAGAAGGQRRRGXEWKHVAELRAVTQAQDPSCNDEDDYTLRRFLRARDHNISKAAXAMLLKYLKWKPVAKPHGAIAAAEVAREAAQGKLYLQGHDREGRPLIYGFGARHHPARRDMEEFKRYVVHVLDATVARLPRRQEKFAAVADLKGWGYANCDIRGYLAALDIMQSYYPERLGRVFLIHVPYVFMAAWKIVYPFIDDNTKKKFVFVADKDLDRTLREAIDDSQLAEIYGGKLKLVAPPANXTATTENGSIP

SEQ ID NO: 22930 - protein, 402 aa, Zea mays
LEAGRGSELGASSAPLFLPLSDFPSLLAPAPRQSFFPLDGAHKSAPNRQTKTRPRPPRQSSVLTFGPSSGYPAAAMAAEASAVQQLAGLLDQVDAPLKKTFENVHQGYPTETLLRFLKAREWHVNKAHRMLEDSLNWRMQNEIDSILEKPIIPVDLYRSIRDTQLIGLSGYSKEGIPVFAVGVGLSTYDKASVNYYVQSHIQINEYRDRFILPTVTKKYGRPITTCIKVLDMTGLKLSALHQMKIVTAISTVDDLNYPEKTETYYIVNAPYIFSACWKVVKPLLQERTRKKVHVLRGCGRDELLQIMDYSSLPHFCRQEGSGSSKHSSGDADNCFSLDHPFHQELYSFIQEQALNQELIKQGSLHVKIPEQDPEDAKIVEVIEAEFHKLGVQNGSANGIDQA

SEQ ID NO: 22931 - protein, 455 aa, Zea mays
  unsure (1)..(455): unsure at all Xaa locations
KPPLFSSPRRSSHHSRRRLVPFPAFPPHPAARPQAPRHRHVSDHHPAARARGSPDLQGRQAQPQSSLMDATALLRSSSFKEDSYVAAALPASELRALADLKXXLLATHPDPISIWGVPLIPVDERADVVLLKFLRARDFRVRDAHAMLLRCAAWRAEFGADAVLDEELGFKDLEGIVAYMHGWDRDGHPVCYNAYGVFKDRDMYERVFGDGDRLARFLRWRVQVMERGVRALTLRPGGVNAIIQVTDLKDMPKRELRAASNQILSLFQDNYPEMVARKVFINVPWYFSVLFSMISPFLTERTKSKFVIAREGNVAETLYKFIRPELVPVQYGGLSRTGDLENGPPKPASEFTIKGGEKVFLEIDGIEAGATITWDLVVGGWDLEYGAEYVPAAEDSYTLCVEKTRMVSATAEAVHNAFTAREAGKMVLSIDNSGSRKRKVAAYRYFVRKSSAXAC

SEQ ID NO: 22932 - protein, 484 aa, Zea mays
  unsure (1)..(484): unsure at all Xaa locations
WVPRGRPGFIFVWEGVLQILLPFENLLFSPLGIRTRPRRSSHHSRRRLVPFPASPPHPAARPQAPRHRHVSDHHPAARARGSPDLQGRQAQPQSSLMDATALLRSSSFKEDSYVAAALPASELRALADLKXXLLATHPDPISIWGVPLNPRSPPAAAVLLKFLRARDFRVRDAHAMLLRCAAWRAEFGADAVLDEELGFKDLEGIVAYMHGWDRDGHPVCYNAYGVFKDRDMYERVFGDGDRLAPCLRWRVQVMERGVRALTLRPGGVNAIIQVTDLKDMPKRELRAASNQILSLFQDNYPEMVARKVFINVPWYFSVLFSMISPFLTERTKSKFVIAREGNVAETLYKFIRPELVPVQYGGLSRTGDLENGPPKPASEFTIKGGEKVFLEIDGIEAGATITWDLVVGGWDLEYGAEYVPAAEDSYTLCVEKTRMVSATAEAVHNAFTAREAGKMVLSIDNSGSRKRKVAAYRYFVRKSSAXAC

SEQ ID NO: 22933 - protein, 327 aa, Zea mays
MGADSEDAVKQLSLLMEQVEAPLKRSFQNMHQGYPKETLVRFLKAREWNVAKAHKMIVECLNWRIQNEIDSVLERPIVPVDLYRSIRDSQLIGLSGYTKEGLPIFGIGVGHSTYDKASVHYYVQSHIQINEYRDRIILPRLTQQFGRPVTSCIKVLDMTGLKLSALSQIKMLTSISTVDDLNYPEKTETYYVVNVPYIFSACWKVVKPLLQERTKKKVKVLTGCGRDELLKIMDYSSLPHFCRREASGSSKHSSTDVDNCFSLDHPFHKELYGHIREQASRRELIKMGSLHVSIPEPDPDDAKIVEVIQAEFQKIGEQDESTNSHKD

SEQ ID NO: 22934 - protein, 286 aa, Schizosaccharomyces pombe
MSETISDPYPLTNPNAPLGHPGHLNSTQQATLDSMRLELQKLGYTERLDDATLLRFLRARKFNLQQSLEMFIKCEKWRKEFGVDDLIKNFHYDEKEAVSKYYPQFYHKTDIDGRPVYVEQLGNIDLKKLYQITTPERMMQNLVYEYEMLALKRFPACSRKAGGLIETSCTIMDLKGVGITSIHSVYSYIRQASSISQDYYPERMGKFYVINAPWGFSSAFNLIKGFLDEATVKKIHILGSNYKSALLEQIPADNLPAKLGGNCQCPGGCELSDAGPWHEEQWMNKN

SEQ ID NO: 22935 - protein, 497 aa, Yarrowia lipolytica
MTVTEQEFLASYPQKVAPGGPTGYPGNLTAEQEQKLGELKMILLTKGYEDRTDDATLLRFLRARKFDVPLAQEMWENCEKWRKEFGTNTILEDFWYKEKKEVAKLYPQYYHKTDKDGRPVYVENVGKVNIHEMYKITTQERMLRNLVWEYESFVRHRLPACSRVVGHLIETSCTILDLKGVSLSSASQVYGFLKDASNIGQNYYPERMGKFYLINAPFGFSTVFSVIKRFLDPVTVSKIHVYGSNYKEKLLAQVPAYNLPIKFGGQSSSKIGVELSDDGPWRDPQFVGPEAWPPWLVSDPPVPPPSSPTPPPTPSPLLPPRSVLTTRPLTQRPTVTELLLPLPELELLLLAVLLLLLELLLPSRLLLPRLLLPRRQGSRSRCCQDRHCPCPHRQDCCTSDQLFPPEMLAMMEQNEKKAEKAAEAKTKGGAAPQANAFTDEQLAQLNSLPQQVATGGVSQPLPDSHVTQGVPTVAKIAELPPVPMRMPIFPIKTKKHT

SEQ ID NO: 22936 - protein, 364 aa, Ajellomyces capsulatus
MTTPAVPSHPLTLDPKYDDYDFPTTAPDAQSGHPGHTTPEQDARVYQLRIMLEQLDYTERLDTLTLLRFLRARKFDVEAAKAMFVECEKWRQEFGTDDLVNTFEYPEKPQVFEYYPQYYHKTDKDGRPVYIEKLGKIDLNAMYKITTADRMLKNLVCEYEKLADPRLPACSRKAGKLLETCCSIMDLKGVGITRVPSVYGYVKQASAISQNYYPERLGKLYLINAPWGFSSVFSVVKGFLDPVTVQKIHVLGSGYEAELLAQVPKENLPKEFGGECECENGCEFSGMGPWQEKEWAKEPKWVTKAPDDTAKEEADKENKGKKGSEGQERQKEAAEAAETAVMQKETEKNEADTVKQKINGEVTA

SEQ ID NO: 22937 - protein, 334 aa, Neurospora crassa
MELEPKYDDYDYPTTAPDAQEGHPGHLTPQQQAQVTQLRLMLESEGYTKRLDTLTLLRFLRARKFDVNLAKQMFVECEKWRAETKLDETIPEWEYPEKEEVSKYYPQYYHKTDKDGRPVYIEQLGKIDLNAMYKITTAERMLTNLAVEYERLADPRLPACSRKAGVLLETCCTIMDLKGVGLTKAPQVFGYVKQASTLSQNYYPERLGKLYLINAPWGFSTVWNVIKAWLDPVTVSKIHVLGSGYSKELLGQVPPENLPKEFGGTCQCAGGCHMSDMGPWREEQWARPAKWEKKADAPAAAPAAAPAATEAAPAPAAEPAVAATEATAPAPAAA

SEQ ID NO: 22938 - protein, 400 aa, Neurospora crassa
MTADSIADASAASGTEVGYPNGHLGHLKPEEQEALESFKTNLAEKGYYKPGPPASHDDQTLLRYLRARRWNVVDAFKQFKETEDWRKANDLNVLYDTIDLEAYEASRRLYPQWTGRRDRRGIPLYLFEIRHLDSKTVSAYEKAAETNPSKAVTDGQTSPKLLRLFALYENLTRFAQPLCTELPDRPHATTTPITLSTNIVDVSGVSLRQFWNLKSHMQAASQLATAHYPETLDRIFIIGAPYFFSTVWGWIKRWFDPITVSKIFILGPSEVKATLEEFIDPKNIPKQYGGELDFTWGDQPKTDPYIKETVKWENGLKDFPEGPKYWRPTADGTRMECVAVGSEGGKQRMLSVGTLERVCNVKKVDGDALAEGVKGLSVGDAEKNEIVETGKEATVPTVSA

SEQ ID NO: 22939 - protein, 301 aa, Candida albicans
MTTMTTEEILASYPQITAPTDQTGYTSNLTPEQKTTLDIFRQQLTELGYKDRLDDASLLRFLRARKFDIQKAIDMFVACEKWREDFGVNTILKDFHYEEKPIVAKMYPTYYHKTDKDGRPVYFEELGKVDLVKMLKITTQERMLKNLVWEYEAMCQYRLPACSRKAGYLVETSCTVLDLSGISVTSAYNVIGYVREASKIGQDYYPERMGKFYLINAPFGFSTAFKLFKPFLDPVTVSKIHILGYSYKKELLKQIPPQNLPVKFGGMSDVSDDDLLLKDVGPWRDPEFIGPEGECPRAYNI

SEQ ID NO: 22940 - protein, 301 aa, Candida albicans
MTTMTTEEILASYPQITAPTDQTGYTSNLTPEQKTTLDIFRQQLTELGYKDRLDDASLLRFLRARKFDIQKAIDMFVACEKWREDFGVNTILKDFHYEEKPIVAKMYPTYYHKTDKDGRPVYFEELGKVDLVKMLKITTQERMLKNLVWEYEAMCQYRLPACSRKAGYLVETSCTVLDLLGISVTSAYNVIGYVREASKIGQDYYPERMGKFYLINAPFGFSTAFKLFKPFLDPVTVSKIHILGYSYKKELLKQIPPQNLPVKFGGMSDVSDDDLLLKDVGPWRDPEFIGPEGECPRAYNI

SEQ ID NO: 22941 - protein, 302 aa, Candida glabrata
MVSEAEFLASYPQKCPAGSLPGTPGNTDEAQEGALKQLRSELEAAGFKERLDDSTLLRFLRARKFDVALAKEMFENCEKWRKEYGTNTIMQDFHYDEKPLVAKYYPQYYHKTDKDGRPVYFEELGAVNLTEMEKITTQERMLKNLVWEYESVVNYRLPACSRAAGYLVETSCTVMDLKGISISSAYSVLSYVREASYISQNYYPERMGKFYLINAPFGFSTAFRLFKPFLDPVTVSKIFILGSSYQSELLKQIPAENLPSKFGGKSEVDEAAGGLYLSDIGPWRDAKYIGPEGEAPEMFSMK

SEQ ID NO: 22942 - protein, 743 aa, Caenorhabditis elegans
MVQTYRSPVRIYKHPFEIVMAAYEMRFPTCPQIPIFVGSEVTYEYKSVDGAEWVIDRKCQLNVEAPYLVKKIAGVDYVYFSQKNSLDRRKRTLDIEATNISFSSRINVKENCTYYVHAENENWTCFEQSASLDVKNFFGLESAVEKLAVRQYGANLAKGKEILEFFIEELLKKTTHIERFRDADQEETTSATDSAIEMKELSDGDAVLVNDRPPMLAAETDEMRTARATASFDDACRVCMIIYCRIFIIISSYFFNFPADSKLEAEYIRRFLGQLSPLEESRLCEIKYSLQAHHKGKLPNDAHLLRFLRARDFDVAKAKDMVHASIIWRKQHNVDKILEEWTRPTVIKQYFPGCWHNSDKAGRPMYILRFGQLDTKGMLRSCGVENLVKLTLSICEDGLQRAAEATRKLGTPISSWSLVVDLDGLSMRHLWRPGVQCLLKIIEIVEANYPETMGQVLVVRAPRVFPVLWTLISPFIDEKTRKKFMVSGGSGGDLKEELRKHIEEKFIPDFLGGSCLTTNCGLGGHVPKSMYLPVEEQEGASSSEDPLHSTYTSTATWRGYPVEVVIPIETAGCVLTWDFDVLKNDCEFSLYFSTEKIEQPAVRDGAQSPTTILNPVEMVSAAIGGASHQHPDLQCAPELKIGTPQLRLEEKAVVFQEGDSMQGSHYCSRAGTYIMQWRVPETAAGHSSTFDFGSHKCRLIYYYEILNSENFRGSVASLESCRSSSFSSIAPPTPPTPGTPRNP

SEQ ID NO: 22943 - protein, 470 aa, Caenorhabditis elegans
MYVHNKKEQNRLNLKLNYFVFQGKLPNDAHLLRFLRARDFDVAKAKDMVHASIIWRKQHNVDKILEEWTRPTVIKQYFPGCWHNSDKAGRPMYILRFGQLDTKGMLRSCGVENLVKLTLSICEDGLQRAAEATRKLGTPISSWSLVVDLDGLSMRHLWRPGVQCLLKIIEIVEANYPETMGQVLVVRAPRVFPVLWTLISPFIDEKTRKKFMVSGGSGGDLKEELRKHIEEKFIPDFLGGSCLTTNCGLGGHVPKSMYLPVEEQEGASSSEDPLHSTYTSTATWRGYPVEVVIPIETAGCVLTWDFDVLKNDCEFSLYFSTEKIEQPAVRDGAQSPTTILNPVEMVSAAIGGASHQHPDLQCAPELKIGTPQLRLEEKAVVFQEGDSMQGSHYCSRAGTYIMQWRVPETAAGHSSTFDFGSHKCRLIYYYEILNSENFRGSVASLESCRSSSFSSIAPPTPPTPGTPRNP

SEQ ID NO: 22944 - protein, 394 aa, Caenorhabditis elegans
MIDDMITAKKFSADILEKAEKLKVSIPSVPDKIDSPFFFARFLNANNGDVEKTRQKIIQLFEHRKLMGYEKINDLDIFTTVNIGKDCFERFHISQLNYEVTSKNLHVFVQKMEGTDIKEILKVMPLSYVLHSYFMLQENFSRAMAHTERKTGKTSSVVCILDLKGLNLMDFMNPLSGPAQLARLVVQVWAEYFSEHLCKLLLINPPGIISVMWQVTKRLVDPNTVEKLAFLSNVEDLKKYLEPEAIPVEYGGTYRDDTGYADPPEGACKQPKRITKEDYKPQEYIWVKNGILKAPKGKSYSIKAFQTSEYIIKTTTEGKLVWNYTTSGDVDFEIVKRDAGKEMAIWPKITVTSLKLPEFGEKLVAPGEYILRFKNPSSTWFPVKVNCAAEILNV

SEQ ID NO: 22945 - protein, 368 aa, Caenorhabditis elegans
MIDDMITAKKFSADILEKAEKLKVSIPSVPDKIDSPFFFARFLNANNGDVEKTRQKIIQLFEHRKLMGYEKINDLDIFTTVNIGKDCFERFHISQLNYEVTSKNLHVFVQKMEGTDIKEILKVMPLSYVLHSYFMLQENFSRAMAHTERKTGKTSSVVCILDLKGLNLMDFMNPLSGPAQLARLVVQVWAEYFSEHLCKLLLINPPGIISVMWQVTKRLVDPNTVEKLAFLSNVEDLKKYLEPEAIPVEYGGTYRDDTGYADPPEGACKQPKRITKEDYKPQEYIWVKNGILKAPKGKSYSIKAFQTSEYIIKTTTEGKLVWNYTTSGDVDFEIVKRDAGKEMAIWPKITVTSLKSLARNLLHRESIF

SEQ ID NO: 22946 - protein, 343 aa, Todarodes pacificus
MSLREQMGADTLIAEYTPPDVIQKFMTGGDVGHDKDGSVLRIEPWGYLDMKGIMYSCKKSDLEKSKLLQCEKHLKDLEAQSEKVGKPCTGLTVVFDMENVGSKHMWKPGLDMYLYLVQVLEDNYPEMMKRLFVINAPTLFPVLYKLVKPLLSEDMKNKIFVLGGDYKDTLLEYIDAEELPAYLGGTKSEGDEKCSELICHGGEVPKEFYLENTDDFETMETITVGSGDKIYVEYEIENENTYIKWEYKTEEHDIGFGLFRKNGDEWEEVVPIERTDCSIMTLDGSHKCKDPGTYALCFDNSFSMMTSKNVRYTAEVMDPEVDSEDINKMIKDSTWDELSAQIS

SEQ ID NO: 22947 - protein, 659 aa, Drosophila melanogaster
MVQKFQSPVRVYKYPFELVMKAYERRFPTCPQMPIVLDCEVIKDESLEDGAKRNTSRRCKLAVDAPYIFKKLIGVDHVYFLQHNFLDLANRTLSIEAVNESFSSRIEIFERCRYYAHPDNSEWTCFDQSATLDIKNFFGFEHSMEKMGMKQYTQTTLKGKEIIEFFIGQLREEGITHVERWTSPSDATKSPTLDQASDQQHSILLDGDFIARSLGQLSPMQESKLLELRKMLDGVDDLERVPSYQTILRFLAARDWHVSQAYAMLCDSLRWRREHRIDALLAEYSKPAVVVEHFPGGWHHLDKDGRPVYILRLGHMDVKGLLKSLGMDGLLRLALHICEEGIQKINESAERLEKPVLNWSLLVDLEGLSMRHLWRPGIKALLNIIETVERNYPETMGRVLVVRAPRVFPIAWTIVSAFIDEHTRSKFLFYGPDCAHMKDGLAQYLDEEIVPDFLGGPCKTMIHEGGLVPKTLYKMNSLEDHDDEVTAELPTTAAAQALVPGKRLSANQQHDHRNLYKSVDLKAGFAHELLIRNEDPKSVLTWDFDVMRNDLHFTLYRVTQELPEKNDSAVSYFDLQDFVEGVNYFREEPTLICRHKESVQGSHVMHHNDSYLMHWFSPSGAQLNVFYEVLSSANYKGSMTSLQSAFSSNSSAASSVQSR

SEQ ID NO: 22948 - protein, 659 aa, Drosophila melanogaster
MVQKFQSPVRVYKYPFELVMKAYERRFPTCPQMPIVLDCEVIKDESLEDGAKRNTSRRCKLAVDAPYIFKKLIGVDHVYFLQHNFLDLANRTLSIEAVNESFSSRIEIFERCRYYAHPDNSEWTCFDQSATLDIKNFFGFEHSMEKMGMKQYTQTTLKGKEIIEFFIGQLREEGITHVERWTSPSDATKSPTLDQASDQQHSILLDGDFIARSLGQLSPMQESKLLELRKMLDGVDDLERVPSYRTILRFLAARDWHVSQAYAMLCDSLRWRREHRIDALLAEYSKPAVVVEHFPGGWHHLDKDGRPVYILRLGHMDVKGLLKSLGMDGLLRLALHICEEGIQKINESAERLEKPVLNWSLLVDLEGLSMRHLWRPGIKALLNIIETVERNYPETMGRVLVVRAPRVFPIAWTIVSAFIDEHTRSKFLFYGPDCAHMKDGLAQYLDEEIVPDFLGGPCKTMIHEGGLVPKTLYKMNSLEDHDDEVTAELPTTAAAQALVPGKRLSANQQHDHRNLYKSVDLKAGFAHELLIRNEDPKSVLTWDFDVMRNDLHFTLYRVTQELPEKNDSAVSYFDLQDFVEGVNYFREEPTLICRHKESVQGSHVMHHNDSYLMHWFSPSGAQLNVFYEVLSSANYKGSMTSLQSAFSSNSSAASSVQSR

SEQ ID NO: 22949 - protein, 697 aa, Danio rerio
MVQKYQSPVRVYKYPFELIMAAYDRRFPTCPLIPMFVKSDIINESHSEDGAELFIERRCTVDVEAPRLLKRIAGVDYMYFIQKNSLNRRERTLHIEAYNESFSSRVNVYEHCCYTVHPESEDWTCFEQSASMDIKSFFGFESTAEKIAMKQYATSIKKGKEIIEFHLKQLEEEGITHMPRWVPPTAPQLIPVSSAKPIPACTSRAHLGSTDVVPGSPDDKLDADYISRYLGTLTPFQESCLIRLRQWLQETHKGKIPKDQHVLRFLRSRDFNLEKAKEALCQTLTWRKQHQIDFLLDTWQSPQPLQDYYTGGWHHHDKDGRPLYILRLGQMDTKGLVRALGEETLLRHVLSINEEGLRRCEENTKIFGKPISCWTCLVDLEGLNMRHLWRPGIKALLRMIEVVGANYPETLGRLLILRAPRVFPVLWTLVSPFIDENTRKKFLIYAGNDYQGPGGLVDYINKDCIPDFLGGDSMCDIPEGGLVPKSLYRTAEELENEEVKLWNETIYKSASVLKGAPHEVLIEITDVSSVITWDFDVCKGDMIFNIYHSRRAPQPVKKEGLSAHNLACPAGNNVQFIDRSWMLGQDYSMVETALTCREGESVQGSHVTRWPGFYILQWRLYSTPSCSSSSRPRVDDVLASLQVSSHRCKVMYFTEVLQSADFRGSMSSLESSHSGFSLLSASTTSSNHSHTASTISR

SEQ ID NO: 22950 - protein, 406 aa, Homo sapiens
MSSRVGDLSPQQQEALARFRENLQDLLPILPNADDYFLLRWLRARNFDLQKSEDMLRRHMEFRKQQDLDNIVTWQPPEVIQLYDSGGLCGYDYEGCPVYFNIIGSLDPKGLLLSASKQDMIRKRIKVCELLLHECELQTQKLGRKIEMALMVFDMEGLSLKHLWKPAVEVYQQFFSILEANYPETLKNLIVIRAPKLFPVAFNLVKSFMSEETRRKIVILGDNWKQELTKFISPDQLPVEFGGTMTDPDGNPKCLTKINYGGEVPKSYYLCEQVRLQYEHTRSVGRGSSLQVENEILFPGCVLRWQFASDGGDIGFGVFLKTKMGEQQSAREMTEVLPSQRYNAHMVPEDGSLTCLQAGVYVLRFDNTYSRMHAKKLSYTVEVLLPDKASEETLQSLKAMRPSPTQ

SEQ ID NO: 22951 - protein, 696 aa, Homo sapiens
MVQRYQSPVRVYKYPFELVMAAYEKRFPTCPQIPVFLGSEVLRESRSPDGAVHVVERSCRLRVDAPRLLRKIAGVEHVVFVQTNILNWKERTLLIEAHNETFANRVVVNEHCSYTVHPENEDWTCFEQSASLDIRSFFGFENALEKIAMKQYTANVKRGKEVIEHYLNELISQGTSHIPRWTPAPVREEDARNQAGPRDPSSLEAHGPRSTLGPALEAVSMDGDKLDADYIERCLGHLTPMQESCLIQLRHWLQETHKGKIPKDEHILRFLRAHDFHLDKAREMLRQSLSWRKQHQVDLLLQTWQPPALLEEFYAGGWHYQDIDGRPLYILRLGQMDTKGLMKAVGEEALLRHVLSVNEEGQKRCEGSTRQLGRPISSWTCLLDLEGLNMRHLWRPGVKALLRMIEVVEDNYPETLGRLLIVRAPRVFPVLWTLISPFINENTRRKFLIYSGSNYQGPGGLVDYLDREVIPDFLGGESVCNVPEGGLVPKSLYMTEEEQEHTDQLWQWSETYHSASVLRGAPHEVAVEILEGESVITWDFDILRGDVVFSLYHTKQAPRLGAREPGTRASGQLIDKGWVLGRDYSRVEAPLVCREGESIQGSHVTRWPGVYLLQWQMHSPPSSVACSLPGVDDVLTALHSPGPKCKLLYYCEVLASEDFRGSMSSLESCTSGFSQLSAATSSSSSGQSHSSSLVSR

SEQ ID NO: 22952 - protein, 756 aa, Homo sapiens
GSWSSLGPAGFAPAPPAFHSCPGRRVFKAGHTRLEIRDRAPPQALCTPLPGDLHWCSSVNMVQRYQSPVRVYKYPFELVMAAYEKRFPTCPQIPVFLGSEVLRESRSPDGAVHVVERSCRLRVDAPRLLRKIAGVEHVVFVQTNILNWKERTLLIEAHNETFANRVVVNEHCSYTVHPENEDWTCFEQSASLDIRSFFGFENALEKIAMKQYTANVKRGKEVIEHYLNELISQGTSHIPRWTPAPVREEDARNQAGPRDPSSLEAHGPRSTLGPALEAVSMDGDKLDADYIERCLGHLTPMQESCLIQLRHWLQETHKGKIPKDEHILRFLRAHDFHLDKAREMLRQSLSWRKQHQVDLLLQTWQPPALLEEFYAGGWHYQDIDGRPLYILRLGQMDTKGLMKAVGEEALLRHVLSVNEEGQKRCEGSTRQLGRPISSWTCLLDLEGLNMRHLWRPGVKALLRMIEVVEDNYPETLGRLLIVRAPRVFPVLWTLISPFINENTRRKFLIYSGSNYQGPGGLVDYLDREVIPDFLGGESVCNVPEGGLVPKSLYMTEEEQEHTDQLWQWSETYHSASVLRGAPHEVAVEILEGESVITWDFDILRGDVVFSLYHTKQAPRLGAREPGTRASGQLIDKGWVLGRDYSRVEAPLVCREGESIQGSHVTRWPGVYLLQWQMHSPPSSVACSLPGVDDVLTALHSPGPKCKLLYYCEVLASEDFRGSMSSLESCTSGFSQLSAATSSSSSGQSHSSSLVSR

SEQ ID NO: 22953 - protein, 403 aa, Homo sapiens
MSGRVGDLSPRQKEALAKFRENVQDVLPALPNPDDHFLLRWLRARSFDLQKSEAMLRKHVEFRKQKDIDNIISWQPPEVIQQYLSGGMCGYDLDGCPVWYDIIGPLDAKGLLFSASKQDLLRTKMRECELLLQECAHQTTKLGRKVETITIIYDCEGLGLKHLWKPAVEAYGEFLCMFEENYPETLKRLFVVKAPKLFPVAYNLIKPFLSEDTRKKIMVLGANWKEVLLKHISPDQVPVEYGGTMTDPDGNPKCKSKINYGGDIPRKYYVRDQVKQQYEHSVQISRGSSHQVEYEILFPGCVLRWQFMSDGADVGFGIFLKTKMGERQRAGEMTEVLPNQRYNSHLVPEDGTLTCSDPGIYVLRFDNTYSFIHAKKVNFTVEVLLPDKASEEKMKQLGAGTPK

SEQ ID NO: 22954 - protein, 403 aa, Homo sapiens
MSGRVGDLSPRQKEALAKFRENVQDVLPALPNPDDYFLLRWLRARSFDLQKSEAMLRKHVEFRKQKDIDNIISWQPPEVIQQYLSGGMCGYDLDGCPVWYDIIGPLDAKGLLFSASKQDLLRTKMRECELLLQECAHQTTKLGRKVETITIIYDCEGLGLKHLWKPAVEAYGEFLCMFEENYPETLKRLFVVKAPKLFPVAYNLIKPFLSEDTRKKIMVLGANWKEVLLKHISPDQVPVEYGGTMTDPDGNPKCKSKINYGGDIPRKYYVRDQVKQQYEHSVQISRGSSHQVEYEILFPGCVLRWQFMSDGADVGFGIFLKTKMGERQRAGEMTEVLPNQRYNSHLVPEDGTLTCSDPGIYVLRFDNTYSFIHAKKVNFTVEVLLPDKASEEKMKQLGAGTPK

SEQ ID NO: 22955 - protein, 715 aa, Homo sapiens
MVQKYQSPVRVYKYPFELIMAAYERRFPTCPLIPMFVGSDTVSEFKSEDGAIHVIERRCKLDVDAPRLLKKIAGVDYVYFVQKNSLNSRERTLHIEAYNETFSNRVIINEHCCYTVHPENEDWTCFEQSASLDIKSFFGFESTVEKIAMKQYTSNIKKGKEIIEYYLRQLEEEGITFVPRWSPPSITPSSETSSSSSKKQAASMAVVIPEAALKEGLSGDALSSPSAPEPVVGTPDDKLDADHIKRYLGDLTPLQESCLIRLRQWLQETHKGKIPKDEHILRFLRARDFNIDKAREIMCQSLTWRKQHQVDYILETWTPPQVLQDYYAGGWHHHDKDGRPLYVLRLGQMDTKGLVRALGEEALLRYVLSVNEERLRRCEENTKVFGRPISSWTCLVDLEGLNMRHLWRPGVKALLRIIEVVEANYPETLGRLLILRAPRVFPVLWTLVSPFIDDNTRRKFLIYAGNDYQGPGGLLDYIDKEIIPDFLSGECMCEVPEGGLVPKSLYRTAEELENEDLKLWTETIYQSASVFKGAPHEILIQIVDASSVITWDFDVCKGDIVFNIYHSKRSPQPPKKDSLGAHSITSPGGNNVQLIDKVWQLGRDYSMVESPLICKEGESVQGSHVTRWPGFYILQWKFHSMPACAASSLPRVDDVLASLQVSSHKCKVMYYTEVIGSEDFRGSMTSLESSHSGFSQLSAATTSSSQSHSSSMISR

SEQ ID NO: 22956 - protein, 400 aa, Homo sapiens
MSGRVGDLSPKQAETLAKFRENVQDVLPALPNPDDYFLLRWLRARNFDLQKSEALLRKYMEFRKTMDIDHILDWQPPEVIQKYMPGGLCGYDRDGCPVWYDIIGPLDPKGLLFSVTKQDLLKTKMRDCERILHECDLQTERLGKKIETIVMIFDCEGLGLKHFWKPLVEVYQEFFGLLEENYPETLKFMLIVKATKLFPVGYNLMKPFLSEDTRRKIIVLGNNWKEGLLKLISPEELPAQFGGTLTDPDGNPKCLTKINYGGEIPKSMYVRDQVKTQYEHSVQINRGSSHQVEYEILFPGCVLRWQFSSDGADIGFGVFLKTKMGERQRAGEMTDVLPSQRYNAHMVPEDGNLTCSEAGVYVLRFDNTYSFVHAKKVSFTVEVLLPDEGMQKYDKELTPV

SEQ ID NO: 22957 - protein, 387 aa, Bos taurus
MSGRVGDLSPKQKEALAKFRENVQDVLPALPNPDDYFLLRWLRARNFNLQKSEAMLRKHVEFRKQKDIDNIMSWQPPEVVQQYLSGGMCGYDLEGSPIWYDIIGPLDAKGLLLSASKQDLFKTKMRDCELLLQECVRQTEKMGKKIEATTLIYDCEGLGLKHLWKPAVEAYGEFLCMFEENYPETLKRLFIVKAPKLFPVAYNLVKPFLSEDTRKKIQVLGANWKEVLLKYISPDQLPVEYGGTMTDPDGNPKCKSKINYGGDIPKKYYVRDQVKQQYEHSVQISRGSSHQVEYEILFPGCVLRWQFMSDGSDIGFGIFLKTKVGERQRAGEMREVLPSQRYSAHLVPEDGSLTCSDPGIYVLRFDNTYSFIHAKKVSFTVDVLLPD

SEQ ID NO: 22958 - protein, 403 aa, Bos taurus
MSGRVGDLSPKQKEALAKFRENVQDVLPALPNPDDYFLLRWLRARNFNLQKSEAMLRKHVEFRKQKDIDNIMSWQPPEVVQQYLSGGMCGYDLEGSPIWYDIIGPLDAKGLLLSASKQDLFKTKMRDCELLLQECVRQTEKMGKKIEATTLIYDCEGLGLKHLWKPAVEAYGEFLCMFEENYPETLKRLFIVKAPKLFPVAYNLVKPFLSEDTRKKIQVLGANWKEVLLKYISPDQLPVEYGGTMTDPDGNPKCKSKINYGGDIPKKYYVRDQVKQQYEHSVQISRGSSHQVEYEILFPGCVLRWQFMSDGSDIGFGIFLKTKVGERQRAGEMREVLPSQRYNAHLVPEDGSLTCSDPGIYVLRFDNTYSFIHAKKVSFTVEVLLPDKALEEKMQQLGAVTPK

SEQ ID NO: 22959 - protein, 385 aa, Anopheles gambiae str. PEST
DILKPEHDDYYLVRWLRARNWNPEAAEKMLRDSMKFRERWNTDEIAKWPTPQILLDYSPHGVSGYDKEGSPIIIIPFAGFDIWGLLHSVSRADIVRMTMQALEGYMQQAYEQSKKTGNPNSRQFIVVFDMDNFNLKQYIWRPASEVVISLIKMYEANYPEILKCCYIINTPKVFAFAYNMVKKFLGEYTIDKIRIYKPDRTKWLPAILERCDADQLPAYFGGTQTDPDGNPKCETKICWGGKVPKELYTSKEDSFNNNLTFTETEIRKGGRLKLTFDCEDAGCFLKWEFRTFDHDIKFGVKCVNKKTEESVIEVPLKRVSSHQVDESGFITCQPGCTYHVLFDNSYSYFKTKKIRYSVLMTAPLNDEEQTMAPIAVTEEETSPAD

SEQ ID NO: 22960 - protein, 325 aa, Arabidopsis thaliana
MSITNEEAVKQLRALMEDVDDSLRESYRNIHQGYPTENLLRFLKARDGNVQKAHKMLLECLEWRTQNEIDKILTKPIVPVDLYRGIRDTQLVGVSGYSKEGLPVIAIGVGLSTYDKASVHYYVQSHIQMNEYRDRVVLPSASKKQGRPICTCLKILDMSGLKLSALSQIKLMTAITTIDDLNYPEKTETYYVVNVPYIFSACWKTIKPLLQERTKKKIQVLKGCGKDELLKIMDYESLPHFCRREGSGSGRHISNGTVDNCFSLDHSFHQDLYDYVKQQALVKGSGAPIRHGSVHVKFPEPDTEGNKIFDTLENEFQKLGNDQKI

SEQ ID NO: 22961 - protein, 344 aa, Arabidopsis thaliana
MSITNEEAVKQLRALMEDVDDSLRESYRKSPFCDVDGGFTNACVMLQNIHQGYPTENLLRFLKARDGNVQKAHKMLLECLEWRTQNEIDKILTKPIVPVDLYRGIRDTQLVGVSGYSKEGLPVIAIGVGLSTYDKASVHYYVQSHIQMNEYRDRVVLPSASKKQGRPICTCLKILDMSGLKLSALSQIKLMTAITTIDDLNYPEKTETYYVVNVPYIFSACWKTIKPLLQERTKKKIQVLKGCGKDELLKIMDYESLPHFCRREGSGSGRHISNGTVDNCFSLDHSFHQDLYDYVKQQALVKGSGAPIRHGSVHVKFPEPDTEGNKIFDTLENEFQKLGNDQKI

SEQ ID NO: 22962 - protein, 227 aa, Arabidopsis thaliana
MGIVSEEAIDEFQELMDQVEEPLKKTYERVHQGYLRENLGPFLKARNWNVCKAHTMLVECLRWRVDNEIDGGLSKPIVPTELYRDVRDSQLIGMSGYTKEGLPVFAIGVGLSTFDKASVHYYVQSHIQINEYRDRVLLPSISKKNGRPITTCVKVLDMTGLKLSALSQIKLVTIISTIDDLNYPEKTQPYYVVNAPYIFSACWKGCKTSFTREDKGKSSCLIRLRKG

SEQ ID NO: 22963 - protein, 324 aa, Glycine max
MGVGSQDAIKQFQAFIDQVEEPLRTTFQNVHQGFVTETLMRFLKARDWDPCKAHKMLVDCLNWRVQNEIDNILSKPIVPADLYRAVRDSQLIGLSGYSREGLPVFAIGVGLSTFDKASVHYYVQSHIQINEYRERIILPSASKKQGRPITTCIKVLDMTGLKLSALNQIKLLTIISSIDDLNYPEKTNTYYIVNAPYIFSACWKVVKPLLQERTRRKIQVLPGCGRDELLTIMDYSSLPHFCRREGSGSSRHSESGSENCYSLDHPFHQELYNHIKQQARLREAVEPIKQGSFHVDFPVPPDDEVEIAKTIESELHKFENGNGV

SEQ ID NO: 22964 - protein, 324 aa, Glycine max; identical to SEQ ID NO: 22963

SEQ ID NO: 22965 - protein, 329 aa, Glycine max
MGLVSQDALNQLQALMDQVLLEEEPLQRTFQNVHQGCVTETLTRFLKAREWNATKAHKMIVDCLKWRVQNEIDNILSKPIIPTDLYRGIRDSQLIGLSGYSREGLPVFAIGVGLSTFDKASVHYYVQSHIQINEYRDRVILPSASKKHERPITTCVKVLDMTGLKLSALNQIKLLTIISSIDDLNYPEKTNTYYIVNAPYIFSACWKVVKPLLQERTRRKVQVLQGCGRDELLKIMDYTSLPHFCRREGSGSSRHSENGNENCYSVDHPFHKQLYNYIKEQSRIHEAVEPIKQGSFHVDFPEPPAEKAEIVKTLESELHKFKISNENGD

SEQ ID NO: 22966 - protein, 326 aa, Glycine max
  unsure (1)..(326): unsure at all Xaa locations
MGVGSQDAIKQLLPVLGVLQNPTSISYENVHQGFVTETLMRFLKARDWDPCKAHKMLVDCLNWRVQNEIDNILSKPIVPADLYRAVRDSQLIGLSGYSREGLPVFAIGVGLSTFDKASVHYYVQSHIQINEYRERIILPSASKKQGRPITTCIKVLDMTGLKLSALNQIKLLTIISSIDDLNYPEKTNTYYIVNXPYIFXACWKVVKPLLQERTRRKVQVLQGCGRDELLKIMDYTSLPHFCRREGSGSSRHSGNGNENCYSLDHPFHQQLYNYIKEKSRIHEAVEPIKQGSFHVDFPEPPAEKAEIVKTLESELHKFKISNVNGD

SEQ ID NO: 22967 - protein, 337 aa, Glycine max
MGGGNQEAVKQLQTLMENVDDEQLKNTFQIMHQGYQTETLIRFLKARDWNIAKAHKMLIDCLNWRVENEIDNVLRKPIPMDLYRAIRDSQLIGMSGYSKEGLPVIAVGVGLSTYDKASDKYYIQSHIQLNEYRDQVILPTATRKHGRYIGTCVKVLDMTGLKFSALNQLRLLTAISTIDDLNYPEKTDTYYIVNVPYVFSACWKVVKPLLQERTRRKIQVLQGCGKEELLKVMDYASLPHFCRKEDSKSSKHHALGNRNCFSFNHAFHQQLYNHIKQQSIIVESISPIRQGSFYVDIPEPDPDDAKIAKTIETEFHKLENQKNGFTNSLNGLRVNGH

SEQ ID NO: 22968 - protein, 331 aa, Glycine max
MGGGNQEAVKQLQTLMENVDDEQLKNTFQIMHQGYQTETLIRFLKARDWSVAKAHKMLIDCLNWRVENEIDNVLRKPIPTDLYKAIRDSQLIGMSGYSKEDLPVIAVGVGLSTYDKASDKYYIQSHIQLNEYRDRVILPTATRKHGRYIGTCVKVLDMSGLKFSALNQLRLLTAISTIDDLNYPEKTDTYYIVNAPYVFSACWRVVKPLLQERTRRKIQVLQGCGKEELLRVMDYASLPHFCRKEDSKSSKHHALGNRNGFSFNHAFHHQLYNVIKHQSIIVESISPIRQGSFYVHIPEPGPGDAEIAWSIESEFRKLESGEWLSQPIKGC

SEQ ID NO: 22969 - protein, 316 aa, Glycine max
  unsure (1)..(316): unsure at all Xaa locations
TSDLGIGSLDALSLLKTMXESEPIXKAYHNEHQGFVTXTLMRXVKKADWDSXKAHRMLVDNLIGKLKDRVDNIITEHILPVDLFRAXXSREGIHVFVSVVGISSSYKASVXHYYVQSHIQINEYRERIILPSASKKQGRPITTCIKVLDMTGLKLSALNQIKLLTIISSIDDLNYPEKTNTYYIVNAPYIFSACWKVVKPLLQERTRRKIQVLPGCGRDELLTIMDYSSLPHFCRREGSGSSRHSESGSENCYSLDHPFHQGLYNHIKQQARLREAVEPIKQGSFHVDFPVPPDDEVEIAKTIESELHKFENGNDV

SEQ ID NO: 22970 - protein, 240 aa, Glycine max
  unsure (1)..(240): unsure at all Xaa locations
XIRHQIGLSGYSREGLPVFAIGVGLSTFDKASVHYYVQSHIQINEYRDRVILPSASKKHERPITTCVKILDMTGLKLSALNQIKLLTIISSIDDLNYPEKTNTYYIVNAPYIFSACWKVVKPLLQERTRRKVQVLQGCGRDELLKIMDYASLPHFCRREGSGSSRHSGNGNENCYSLDHPFHQQLYNYIKEKSRIHEAVEPIKQGSFHVDFPEPPAEKAEIVKTLESELHKFKISNVNGD

SEQ ID NO: 22971 - protein, 229 aa, Glycine max
  unsure (1)..(229): unsure at all Xaa locations
MCIINQEAIKQLQSLMENLDEQQKNTFQIMHRGYPTETLVRFLKARDGNVVKAHKMLIDCLQWRVENEIDNVLSKPIPPDLYRRLRDSQLVGMSGFSKEGLPVIAGGVGLSTFDEVFDKYYVQSHIQMNEYRDRVMLPTATKNHGRHIDTCVKVLDMTGLKLSALSQLKLWTAISTIDDLNYPXKTDAYYIVNGPYVFSACWKVVKPLLQXRTRRKVXVLKGXGMEELL

SEQ ID NO: 22972 - protein, 165 aa, Glycine max
  unsure (1)..(165): unsure at all Xaa locations
MGVGSQDAIKQFQAFIDQVEEPLRTTFQNVHQGFVTATLMRFLKARDWDPYKAQKMLVDCLNWRVQNEIDNILSKPIVPADLYRAVRDSQLIGLSGYSREGLPVFAIGVGLNTFDKASVHYYVQSHIQINEYXRERIGLPSASEKQGRPITTCIKVLHMTGLKLX

SEQ ID NO: 22973 - protein, 123 aa, Glycine max
  unsure (1)..(123): unsure at all Xaa locations
MGVGSQDAIKQFQAFIDQVEEPLRTTFQNVHQGFVTATLMRFLKARDWDPYKAQKMLVDCLNWRVQNEIDNILSKPIVPADLYRAVRDSQLIGLSGYSREVLPVFXIGVGLNTFDKTSAHYYL

SEQ ID NO: 22974 - protein, 128 aa, Glycine max
PTSITLLFQKGSRKHGRYIGTCVKVLDMSGLKFSALNLLQLLTAISTIDDLNYPEKTDTYYIVNAPYVFSACWKVVKPLLQERTRRKIQVLQGWGKEELLRVNNLLSLVNIIFNNLLLAITISPMPYV

SEQ ID NO: 22975 - protein, 97 aa, Glycine max
  unsure (1)..(97): unsure at all Xaa locations
MGLVSQDALNQLQALMDQVLLEEEPLQRTFQNVHLGCVAETLTRFLIAREWNATKAHQMIVDCLKWRVQNEIDNILSKPIIPTDLYRGIRDSQLIGX

SEQ ID NO: 22976 - protein, 115 aa, Glycine max
RTRPNLLWVMDYASLPHFCRKEDSKSSKHHASGNSGNCFSFNHAFHQQLYNHIKQQAIIVESISPIRQGSFCVDIPEPDPDDAKIAKTIENEFHKLENQKNGFTNSLTGLTVNGH

SEQ ID NO: 22977 - protein, 407 aa, Drosophila melanogaster
MSGPLPEISEEQRAILEKFRKQMDDALVGTHDDYFLVRWLRARKWNLEAAEKMLRASLKTRAMWNVDNIEKWDPPKALQEYLPYGLMGYDNEGSPVLVCPFANFDMWGMMHCVTRFEFQKYLVLLLERFMKIAYDQSQKHGWRARQLVVFFDMQDVNLKQYAWRPAAECVISTVKQYEANFPELLKMCYIINAPKLFSVAFNIVKKFLDENTTSKIVIYKSGVDRWQEQLFSHVNRKAFPKAWGGEMVDRNGDPQCKALMVWGGKLPEELYIDQSSQQSDRDFVEAQVPKGDKLKLHFKVNVEEQKILSWEFRTFDYDIKFGIYSVDDKTGEKRSEVPLGTVYSNEMDEIGYISTRPNTTYTVVFDNSASYLRSKKLRYWVDLISEEEEGISELTTQMDNTQIANQQ

SEQ ID NO: 22978 - protein, 192 aa, Arabidopsis thaliana
IEKASTMFLNYLTWKRSMLPKGHIPEAEIANDLSHNKMCMQGHDKMGRPIAVAIGNRHNPSKGNPDEFKRFVVYTLEKICARMPRGQEKFVAIGDLQGWGYSNCDIRGYLAALSTLQDCYPERLGKLYIVHAPYIFMTAWKVIYPFIDANTKKKIVFVENKKLTPTLLEDIDESQLPDIYGGKLPLVPIQET

SEQ ID NO: 22979 - protein, 252 aa, Arabidopsis thaliana
MEESQELALTQLRKSVEKLSSSTEGYDKPTLMRFLVARSMDPVKAAKMFVDWQKWRASMVPPTGFIPESEVQDELEFRKVCLQGPTKSGHPLVLVITSKHFASKDPANFKKFVVYALDKTIASGNNGKEVGGEKLVAVIDLANITYKNLDARGLITGFQFLQSYYPERLAKCYILHMPGFFVTVWKFVCRFLEKATQEKIVIVTDGEEQRKFEEEIGADALPEEYGGRAKLTAIQDVLLPQAAPVTLTNNNV

SEQ ID NO: 22980 - protein, 239 aa, Arabidopsis thaliana
MVFVVVVSSEKGYDKPTLMRFLVARSMDPVKAAKMFVDWQKWRASMVPPTGFIPESEVQDELEFRKVCLQGPTKSGHPLVLVITSKHFASKDPANFKKFVVYALDKTIASGNNGKEVGGEKLVAVIDLANITYKNLDARGLITGFQFLQSYYPERLAKCYILHMPGFFVTVWKFVCRFLEKATQEKIVIVTDGEEQRKFEEEIGADALPEEYGGRAKLTAIQDVLLPQAAPVTLTNNNV

SEQ ID NO: 22981 - protein, 256 aa, Glycine max; identical to SEQ ID NO: 674

SEQ ID NO: 22982 - protein, 256 aa, Glycine max; identical to SEQ ID NO: 674

SEQ ID NO: 22983 - protein, 264 aa, Glycine max
MEGVSPEPLRSELDSKSKHDTAKEDDDALKDSTEAEVTKIRLMRAFVESRDPSSKEENDLMMRRFLRARSLDVEKASAMFLKYLKWKRSFVPNGCISPSEIAEDIAQDKVFTQGLDKKGRPIVVTFAAKHFQSKNGADGFKRYVVFVLEKLCSRMPPGQEKFLAIADIKGWAYVNSDLRGYLNSLSILQDCYPERLGKMLIVHAPYMFMKIWKMIYPFIDENTKKKIVFVENKKLKSTLLEEIEESQIPDIYGGQMPLVPIQNS

SEQ ID NO: 22984 - protein, 227 aa, Glycine max
  unsure (1)..(227): unsure at all Xaa locations
CLREIDLIPWLQKDKXQKEEDDFMIRRFLRARDLDVEKASAMLLKYLKWRNSFVPNGSVSVSDVPNELAQDKVFMQGHDKIGRPILMVFGGRHFQNKDGLDEFKRFVVYVLDKVCASMPPGQEKFVGIAELKGWGYSNSDVRGYLSALSILQDYYPERLGKLFIVNAPYIFMKVWQIVYPFIDNKTKKKIVFVEKNKVKSTLLEEMEESQVPEIFGGSLPLVPIQDS

SEQ ID NO: 22985 - protein, 227 aa, Glycine max
MEGVSPEPLRSELDSKSKHDTAKEDDDALKDSTEAEVTKIRLMRAFVESRDPSSKEENDLMMRRFLRARSLDVEKASAMFLKYLKWKRSFVPNGCISPSEIAEDIAQDKVFTQGLDKKGRPIVVTFAAKHFQSKNGADGFKRYVVFVLEKLCSRMPPGQEKFLAIADIKGWAYVNSDLRGYLNALSILQIVFVENKKLKSTLLEEIEESQLPDIYGGQMPLVPIQNS

SEQ ID NO: 22986 - protein, 269 aa, Glycine max
  unsure (1)..(269): unsure at all Xaa locations
MDQGRDSALTQMRKSVEKLGSSAEGYGDPTLMRFLIARSMEVDKAAKMFLQWKKWRSAMVPNGFISESEIPDELEARKIFLQGLSQDKFPVMIVQTNRHFASKDQIQFKKFVVYLLDKTIASAFKGREIGTEKLIGIIDLQNISYKNIDARGLITGFQFLQAYYPERLAKCYMLHMPWFFVSVWKLVSRFLEKATLEKIVIVSNEDETREFVREVGEEVLPEMYGGRAKLEAIQDVELPXPRKRNNKLINMIAHTVIEESCRGHLMLKV

SEQ ID NO: 22987 - protein, 161 aa, Glycine max
  unsure (1)..(161): unsure at all Xaa locations
XETVRTREGALAKDTTETELTKIPLLRATVETLHPSSKEEDDFMIRRFLRARDLDVEKASAMFLKYLKWRHEFVPNGSVSVSDVPIELAQDKVFMQGRDKIGRPILIVFGRRHFQNKDGLDEFKRFVVYVLDKVCASMPPGQERLVGIAELKGWGYSNSDX

SEQ ID NO: 22988 - protein, 131 aa, Glycine max
  unsure (1)..(131): unsure at all Xaa locations
XRYVVFVLEKLCSRMPPGQEKFLAIADIKGWAYANSDLRGYLNALSILQTSCFXLQDCYPERLGKMVIVHAPYMFMKIWKMIYPFIDDNTKKKIVFVENKKLKSTLLEEIEESQLPDIYGGQMPLVPIQNS

SEQ ID NO: 22989 - protein, 134 aa, Glycine max
  unsure (1)..(134): unsure at all Xaa locations
XVRLREDDRRXIRRFLRARDLDVEKASAMLLKYLKWRHAFVPNGSVSVSDVPIELAQDKVFMQGRDKIGRPILMVFGGRLFQNKDGLXDEFKRFVVYVLDKVCASFSTLDPAXXTMNSIRGCAYRNSNLTIHTX

SEQ ID NO: 22990 - protein, 79 aa, Glycine max
  unsure (1)..(79): unsure at all Xaa locations
XLQDYYPERLGKLFIVNAPYIFMKVWKIIYPFIDNKTKKKIVFVEKNKVKSTLLEEMDESQVPEIFGGSLSLVPIQDAN

SEQ ID NO: 22991 - protein, 247 aa, Dictyostelium discoideum
MSGYVGNLSPEQEHQLGIIKSKIAEINDPVVEKEIQQLDDSMTLRFLRARKWNLKDSFDMLYEALKFRATFQDVGVEGITESMVVNELKSGKSYFHGVDKGGRPVCIVKTSRHDSYNRDLNESMRYCVYVMENGKSMLKDGIETCTLIFDMSDFSSKNMDYPLVKFMVELFQKFYPESLQKCLILNAPWIFMGIWHIIKHWLDPNTASKVSFVKTKQLVDYIPKDQLESSYGGTSTFKYTYEGKEVK

SEQ ID NO: 22992 - protein, 255 aa, Triticum aestivum
  unsure (1)..(255): unsure at all Xaa locations
MASSVGGDAGEGEWLKVAELRAMAEAQDPHVQEVDNLTLRRFLRARGHAVGKASSMLLKFVAWRREAVPGGVVPAELVRTELSHEMAYMGGADRAGRPVMLAFPAKHFSATRDMAGFKRYIVYLFDAMCARIPRGQEKFLCVVDLKGWGYANCDVRAYIAAIEILQNYYPERLGKALMIHVPYLFMKAWKLVQPFIDANTRDKFVFVDDKSLEETLRREMEDGQLPEMYGGKMPIVPLEXSEEVXGRGIDVPEIN

SEQ ID NO: 22993 - protein, 259 aa, Triticum aestivum
  unsure (1)..(259): unsure at all Xaa locations
MASSVEGGGDAGEGEWLKVAELKAMAEAQDPHVKEVDNMTLRRFLRARDHDVGKASAMLLKFVAWRREAVPGGVVPADLVRPXELSQDKARMGXGVDRAGRPVLLVFPARHFSADRDMAEHKRLVVYLLDRISARIPRGQDKFMCIVDLRGGGXYPNSDVRAYIAAIEIMQGYYPERLGKALMVHVPYIFMKAWKMVYPFIDTNTRDKFVFVDDKNLEETLRREMDESQVPEMYGGKLPTVPLTDDXASYNVRSINRCT

SEQ ID NO: 22994 - protein, 1008 aa, Schizosaccharomyces pombe
MKDSEHHHHGHNGFSKFLHKLGFGKSKGKSHKSNTSSIHERENTAAKGPASNVRPARPNVSTSSTSNEVRKSVPVGNPTVHTKTGSSSSPASKMRNTVNLQHIQAANQKTRNAEGERKVAQRRVQSDKAEANDAAMSSSAPTVDVSEGNSAAEPKITPDDSDTPRLNVDMNDKINVDEAAAKSDSKLNVDQINSTTESEKRVEKVNPNIANNPLKSPDAVAYSSETVSDEKQPTEHPVSANVPAKSEKAVCDENTKISLTNTEHYKFHSLRGDVEVVVGDLERDGRDTSLGDASVNEAAKETDVDSSRFISDEKAVTEDAMKTEHASNAPLTDERHFQFHSSEGDIEGIVGTMQRQRQSVSSYDTIVPSQFYKQKVVQNSPPSLLSTDNKIPESGSDHPSSQDNSSKASLVENSQTQSSTPRKPLPTTTSPKVNPEPHSESISDTRPSTPRKVPPSTVPKMNPKLQGGNSVTAPSTPSKVLPAMSPKVAPKFQGGRSSTAPSTPNKVLPAASAKAAPKLQEKAASFDIPNKSTIISTKSTVASPIKANENSPALKSKASFEFPKELDPDGTWNAPIPYPDANCPMAPTYRNLTSEQEEMYEEVLKYCLELKEIPVASNSSKKTDLIELERLWLTRECILRYLRATKWHVSNAKKRIVDTLVWRRHFGVNNMDPDEIQEENATGKQVLLGYDKDGRPCLYLYPARQNTKTSPLQIRHLVFSLECAIDLMPPGVETLALLINFKSSSNRSNPSVGQGKEVLNILQTHYCERLGRALVINIPWAVWGFFKLISPFIDPITREKLKFNEPLDRYVPKDQLDSNFGGSLHFEYHHEKYWPQLVELCKSRRLGILEKWRKMGSKIGTSEWDLKGGEEYVELMQQYVRPSLTNRSSSPTVTPTVNTDRQPKTLTNSADELSPQKRRVENPKPVVKDEGPVSIVEDEESTPVVTKKEDSIPVAQSTKADAGLDAENDLLPKSGSGVSETPAFSHARDVSTASFSDAVSFITADSIE

SEQ ID NO: 22995 - protein, 409 aa, Neurospora crassa
MATVLKVPLASPTPDSQPKPQAALTADQEEKYNWLLEQVKNWKEVPATEGKAGPITDREKFWLTRECLLRFLRATKWNQKEAEKRILGTLTWRREYGVEELTADHISPENETGKQIILGYDKEGRVCHYLNPGRQNTEASPRQVQHLVFMLERVIDLMPPQVETLSLLINFKSSKSRSNTAPGIGQAREVLNILQNHYPERLGRALIINVPWIVNGFFKLITPFIDPNTREKLKFNEDMKKYVPAEQLWTEFNGSLEFDYDHATYWPALQKMCVEKREAKYQRWVAGGQQIGELEDFITGHAQVGVAGPIAAATSAPEPTPAASAPAPAAEPETILAPEPALASETALAPPPVTASVPVATEAHDEAPAPAPEAAAIPEPTPAAVPVEEKKEEEKPKVVASTEVGETTA

SEQ ID NO: 22996 - protein, 317 aa, Mus musculus
MSDGVGTFRMVPEEEQELRAQLEQLTTKDHGPVFGPCSQLPRHTLQKAKDELNEKEETREEAVRELQELVQAQAASGEELALAVAERVQARDSAFLLRFIRARKFDVGRAYELLKGYVNFRLQYPELFDSLSMEALRCTIEAGYPGVLSSRDKYGRVVMLFNIENWHCEEVTFDEILQAYCFILEKLLENEETQINGFCIVENFKGFTMQQAAGLRPSDLKKMVDMLQDSFPARFKAIHFIHQPWYFTTTYNVVKPFLKNKLLQRVFVHGDDLDGFFQEIDENILPADFGGTLPKYDGKVVAEQLFGPRAEVENTAL

SEQ ID NO: 22997 - protein, 275 aa, Mus musculus
MRPGPLVGKQLNELPDHSPLLQPGLAELRRRVQEAGVPQTPQPLTDAFLLRFLRARDFDLDLAWRLMKNYYKWRAECPELSADLRPRSILGLLKAGYHGVLRSRDSTGSRVLIYRIAYWDPKVFTAYDVFRVSLITSELIVQEVETQRNGVKAIFDLEGWQVSHAFQITPSVAKKIAAVLTDSFPLKVRGIHLINEPVIFHAVFSMIKPFLTEKIKDRIHLHGNNYKSSMLQHFPDILPREYGGKEFSMEDICQEWTNFIMKSEDYLSSISETIQ

SEQ ID NO: 22998 - protein, 271 aa, Mus musculus
MAEMRPGPLVGKQLNELPDHSPLLQPGLAELRRRVQEAGVPQTPQPLTDAFLLRFLRARDFDLDLAWRLMKNYYKWRAECPELSADLRPRSILGLLKAGYHGVLRSRDSTGSRVLIYRIAYWDPKVFTAYDVFRVSLITSELIVQEVETQRNGVKAIFDLEGWQVSHAFQITPSVAKKIAAVLTDSFPLKVRGIHLINEPVIFHAVFSMIKPFLTEKIKDRIHLHGNNYKSSMLQHFPDILPREYGGKEFSMEDICQEWTNFIMKSEDYLS

SEQ ID NO: 22999 - protein, 278 aa, Mus musculus
MAEMRPGPLVGKQLNELPDHSPLLQPGLAELRRRVQEAGVPQTPQPLTDAFLLRFLRARDFDLDLAWRLMKNYYKWRAECPELSADLRPRSILGLLKAGYHGVLRSRDSTGSRVLIYRIAYWDPKVFTAYDVFRVSLITSELIVQEVETQRNGVKAIFDLEGWQVSHAFQITPSVAKKIAAVLTDSFPLKVRGIHLINEPVIFHAVFSMIKPFLTEKIKDRIHLHGNNYKSSMLQHFPDILPREYGGKEFSMEDICQEWTNFIMKSEDYLSSISETIQ

SEQ ID NO: 23000 - protein, 296 aa, Arabidopsis thaliana
MFRWKNSSQTEQEQKEAALREAKMKELKTLIGQLSGRNSLYCSDACLKRYLEARNWNVGKAKKMLEETLKWRSSFKPEEIRWNEVSGEGETGKVYKAGFHDRHGRTVLILRPGLQNTKSLENQMKHLVYLIENAILNLPEDQEQMSWLIDFTGWSMSTSVPIKSARETINILQNHYPERLAVAFLYNPPRLFEAFWKIVKYFIDAKTFVKVKFVYPKNSESVELMSTFFDEENLPTEFGGKALLQYNYEEFSKQMNQDDVKTANFWGLGHSNNNQLHASNGFSGAEIAPEPIQNHP

SEQ ID NO: 23001 - protein, 294 aa, Arabidopsis thaliana
MFRRRNAHQLDNDDSQQDNKVRELKSAIGPLSGHSLVFCSDASLRRFLDARNWDVEKAKKMIQETLKWRSTYKPQEIRWNQVAHEGETGKASRASFHDRQGRVVLIMRPAMQNSTSQEGNIRHLVYLLENAIINLPKGQKQMSWLIDFTGWSMAVNPPMKTTREIIHILQNYYPERLGIAFLYNPPRLFQAVYRAAKYFLDPRTAEKVKFVYPKDKASDELMATHFDVENLPKEFGGEATLEYDHEDFSRQMYEDDLKTAKYWGLEGKHYPKTNGFSPSDVVPEPAIEIASAAS

SEQ ID NO: 23002 - protein, 294 aa, Arabidopsis thaliana
MFRRRNAHQLDNDDSQQDNKVRELKSAIGPLSGHSLVFCSDASLRRFLDARNWDVEKAKKMIQETLKWRSTYKPQEIRWNQVAHEGETGKASRASFHDRQGRVVLIMRPAMQNSTSQEGNIRHLVYLLENAIINLPKGQKQMSWLIDFTGWSMAVNPPMKTTREIIHILQNYYPERLGIAFLYNPPRLFQAVYRAAKYFLDPRTAEKVKFVYPKDKASDELMTTHFDVENLPKEFGGEATLEYDHEDFSRQMYEDDLKTAKYWGLEGKHYPKTNGFSPSDVVPEPAIEIASAAS

SEQ ID NO: 23003 - protein, 299 aa, Glycine max
  unsure (1)..(299): unsure at all Xaa locations
MFHRWSNSHQQDQGSSELYAESKIKELKGVIGPLSGRSLTYCTDACFKRYLEARNWNVDKSKKMLEETLRWRSTYKPEEIRWHEVAMEGETGKLYRASFHDRQGRTVLILRPGMQNTTSMENQLRHLVYLLENAMLNLPPGQEQMSWLIDFTGWSITNNVPLKLARETINILQNHYPERLAIAFLYNPPRVFEAFWKIVKYFLDNKTFQKVKFVYPNNKDSVQVMKSYFDEENLPKELGGKSIMSYNHEEFSRLMVQDDLKCAAFWGSDGKLSNHIVNGNSASVLKXSSHNVWITVCRW

SEQ ID NO: 23004 - protein, 323 aa, Glycine max
  unsure (1)..(323): unsure at all Xaa locations
MFHRWSNSHQQDQGSSELCTESRCIKELKGAIGPLSGRSLMYCTDSCFKRYLEARNWNVDKSKKMLEETLRWRSTYKPEEIRWHEVAIEGETGKLYRANFHDRQGRNVLILRPGMQNTTSMENQLRHLVYLLENAMLNLPPGQEQMSWLIDFTGWSITNNVPLKLARETINIXQNHYPERLAIAFLYNPPXRVFEAFWKIVKYFLDNKTFQKVKFVYPKNKDSVELMKSYFDEENLPKELGGKSIMSYNHDEFSRLMVQDDLKCAAFWGSDGKLSNHIANGQSPXXFAMKPHPRHVKAMFGLPFAGGECTLKVRREKHSLCYF

SEQ ID NO: 23005 - protein, 301 aa, Glycine max
MFLLRRQTQNNQENDSSYQDTKVAELKTGLGPLSGRRLKYCTDACLRRYLEARNWNVDKAKKMLEETLKWRATYKPEEIRWAEIAHEGETGKVSRANFHDRLGRTVLIMRPGMQNTTSAEDNIRHLVYLLENAILNLSEGQEQMSWLIDFTGLSLSTNMSVKTSRDIIHILQNHYPERLAIAFMYNPPRIFQAFWKAPRFCQAIRFFLDPKTVQKVKFVYPNNKDSVELIKSLFATENLPSEFGGKTSLKYDHEEFSRLMTEDDVKPAKFWGLDEEPYPPKKGHSGAEVAPEPVPVQAVVS

SEQ ID NO: 23006 - protein, 296 aa, Glycine max
MFLLRRQTQNHHENDSSYQDTKVAELKTALGPLSGRQLKYCTDACLRRYLEARNWSVDKTTAARRRQKGEWRATYRPEEIRWAEIAHEGETGKVSRANFHDRHGRAVLIMRPGMQNTASAEDNIRHLVYLLENAILNLSEGQEQMSWLIDFTGLSLSTNISVKTSRDIIHILQNHYPERLAIAFLYNPPRIFQAFWKAIRFFLDPNTVQKVKFVYPNNKDSVELMKSLFDMENLPSEFGGKTSLKYDHEEFSRLMTEDDVKTAKFWGLDEEPYPPKKGHSGAEVAPEPVPVEAVVS

SEQ ID NO: 23007 - protein, 318 aa, Oryza sativa (japonica cultivar-group)
MSFLFKSSNGATTEKNLTLEEQQEKINDLRKELGEHSSEEIQDFLSDASCLRFLRARNWNVQKASKMMKSAVKWRVSYMPQKINWDDVAHEAETGKIYRADYKDKHGRTVLVLRPGLENTTSGKGQIKYLVYCLEKAIMSLTEDQEKMVWLTDFQSWTLGSTPLKVTRETVNVLQDCYPERLGLAILYNPPRIFESFWKIVKPFLDHETYKKVKFVYSSDKESQKIMADVFDLDKLDSAFGGRNPATFEYNSYAERMRADDIKMGSSFKSNGITLPQDHSHVSADKEANGGGSDASSEASFYSGTDSPNHEEGGSILA

SEQ ID NO: 23008 - protein, 324 aa, Dictyostelium discoideum
MESTASTSDSASAITTGLSEVDINQQSPPIILKEGEIFDPLKNLNEKQLEAFKEIKSNFSDLTDPTDIAFCTDMCFLRYLRARNYIVSKSEKMLRDTLEWRKKFRPQDIQLGGDIREIGSAGCVYVNKRDKKGRPIIFAVPRNDTLKNVPSELKFKNLVYWLEQGFSRMDEPKGIEQFCFIVDYKDFGSGNMDMKTNLEAMHFLLDHCPERMGQSLFLDPPALFWFAWKIISPFLNEVTLSKVRFINSKKVDGKRTFAELLEYVDIENLEQNLGGNLDYNYNIDEYLKENPDPIVDTPPITFSSCRIFFQFILLIYFINLIDFI

SEQ ID NO: 23009 - protein, 301 aa, Oryza sativa
  unsure (1)..(301): unsure at all Xaa locations
MFSFRKKHASRFDSDDIEQQEAKIQELRAALGPLSSSGKKYCTEACLRRYLEARNWNVDKSRKMLEESLKWRTAYRPEDIRWPEISVESETGKMYRASFVDREGRTGVIMRXPAKHNTSSHEGQVRFLVYTLENAILSLPEDQEKMVWLIDFTGWTLANATPIKTARECANILQNHYPERLAIGILFNPPKVFEAFWKVVKHFLDPKSIQKGEFXVYLKDEESMKILHKYIDPEVLPVEFGGKNNVVYSHEEYSKLMVKDDIKMASFWASDTKTDHVNKVINEHSVPEVTQQSSLVAAKAS

SEQ ID NO: 23010 - protein, 258 aa, Oryza sativa
MFSFRKKHASRFDSDDIEQQEAKIQELRAALGPLSSSGKKYCTEACLRRYLEARNWNVDKSRKMLEESLKWRTAYRPEDIRWVRFLVYTLENAILSLPEDQEKMVWLIDFTGWTLANATPIKTARECANILQNHYPERLAIGILFNPPKVFEAFWKVVKHFLDPKSIQKVNFVYLKNEESMKILHKYIDPEVLPVEFGGKNNVVYSHEEYSKLMVKDDIKMASFWASDTKTDHVNKVINEHSVPEVTQQSSLVAAKAS

SEQ ID NO: 23011 - protein, 342 aa, Triticum aestivum
  unsure (1)..(342): unsure at all Xaa locations
MFRRKHTSHFNSDDAEQRQAKINELRAALGPVSARGEKYCSEACLARYLEARNWNVDKSRKMLEESLKWRAASKPEDTRWPDVSVEAETGKMYRATFTDREGRTVVIMRPAKQNTSSHEGQLRYLIYTLENAILSLPQGLDKMVWVIDFTGWTLAHATPLKTARDSVNIVQNHYPERLSAAFLFNPPKIFEASFKVIKVFLDPKSTQKLNFVYKENEESMKTMYNHIDPEVLPVEFGGKNIVVYNHEDYSKLMTKDDIKTTSFWAADGSHAVNGGSVPQVIPQSSPIVAKASXGTSASHLTCYCKSKLRSFSEPMSRFTALKEEYVYRYVEDVWINKCNCNI

SEQ ID NO: 23012 - protein, 292 aa, Triticum aestivum
MFRKKQASHFDSDDAEQRQAKIKELKAALGPFSARGKKYCDEACLVRYLEARNWNVDKSRKMLEESIKWRAAKRPEDIRWPDVSVEAETGKMYRATFTDREGRTVVVMRPAKQNTSSHEGQLQYLVYTLENAVLSCLKVMTKMVWLIDFTGWTLAHATPFKTARDCMNVLQNHYPERLSIAFLFNPPKVFEASFKVLKVLVDPKSAQKLNFVYKENEESMKTMYSHIDPEVLPVEFGGKNNVVYNHEDYSKLMIKDDIKRASFWAADVSHVVNVDSVPEVKPQSSLIVAKAS

SEQ ID NO: 23013 - protein, 444 aa, Schizosaccharomyces pombe
MPEGAGRPWNLTELEEEKLKTMWSYLFKLFGITLLERTESWYTVKTHLSDDSSSSSSHRLSSVSYAKSRTRLELTSSSHGSDTRSFNDKTKNVHLERVEKIASEWDPEGLRVCFWDAVNCDDPDGLLLRFLRARKWNVEAALEMFMKTVHWRSREMNVGEIVCNADHLDKDDDFVRQLRIGKCFIFGEDKHNRPVCYIRARLHKVGDVSPESVERLTVWVMETARLILKPPIETATVVFDMTDFSMSNMDYGPLKFMIKCFEAHYPECLGECIVHKAPWLFQGVWSIIKSWLDPVVVSKVKFTRNYRDLQQYINPDNILKEFGGPNPWRYTYPEPCQNEAEALKNVEARKSLRAKKDAIAKQYEEVTMDWILNNGDMAEVKQKRRKLASQLIDAYWNLDKYIRARSVYDRMGLIAPQTSHTLLLSQPTNGDVKESMVEVTSSAT

SEQ ID NO: 23014 - protein, 350 aa, Saccharomyces cerevisiae
MGLFSRKRDHTPAVPKEKLIPCDKIFLDPPAKYGNAPLLEPISEDQNEKYRAVLRHFQDDDLKLPENLNDLDNGTHANDRPLSDWEKFWLSRECFLRYLRANKWNTANAIKGLTKTLVWRREIGLTHGKEDKDPLTADKVAVENETGKQVILGFDNAKRPLYYMKNGRQNTESSFRQVQELVYMMETATTVAPQGVEKITVLVDFKSYKEPGIITDKAPPISIARMCLNVMQDHYPERLAKCVLINIPWFAWAFLKMMYPFLDPATKAKAIFDEPFENHIEPSQLDALYNGLLDFKYKHEVYWPDMVKKVDDLRLKRFDRFLKFGGIVGLSEYDTKGQHDELKYPVDMVI

SEQ ID NO: 23015 - protein, 351 aa, Saccharomyces cerevisiae
MFKRFSKKKEAPEDPKNLINIDKPIKELPASIAIPKEKPLTGEQQKMYDEVLKHFSNPDLKVYTSEKNKSEDDLKPLEEEEKAWLTRECFLRYLRATKWVLKDCIDRITMTLAWRREFGISHLGEEHGDKITADLVAVENESGKQVILGYENDARPILYLKPGRQNTKTSHRQVQHLVFMLERVIDFMPAGQDSLALLIDFKDYPDVPKVPGNSKIPPIGVGKEVLHILQTHYPERLGKALLTNIPWLAWTFLKLIHPFIDPLTREKLVFDEPFVKYVPKNELDSLYGGDLKFKYNHDVYWPALVETAREKRDHYFKRFQSFGGIVGLSEVDLRGTHEKLLYPVKSESSTV

SEQ ID NO: 23016 - protein, 222 aa, Drosophila melanogaster
MSSEELAPINEQDFKDLKERMKLIVEADPKQYHNDFSLRRYLRAFKTTDDAFQAILKTNKWRETYGVDKLSEMDRSQLDKKARLLRHRDCIGRPVIYIPAKNHSSERDIDELTRFIVYNLEEACKKCFEEVTDRLCIVFDLAEFSTSCMDYQLVQNLIWLLGKHFPERLGVCLIINSPGLFSTIWPAIRVLLDDNTAKKVKFVADEAELCQYLIPDILPTDM

SEQ ID NO: 23017 - protein, 317 aa, Homo sapiens
MSEGVGTFRMVPEEEQELRAQLEQLTTKDHGPVFGPCSQLPRHTLQKAKDELNEREETREEAVRELQEMVQAQAASGEELAVAVAERVQEKDSGFFLRFIRARKFNVGRAYELLRGYVNFRLQYPELFDSLSPEAVRCTIEAGYPGVLSSRDKYGRVVMLFNIENWQSQEITFDEILQAYCFILEKLLENEETQINGFCIIENFKGFTMQQAASLRTSDLRKMVDMLQDSFPARFKAIHFIHQPWYFTTTYNVVKPFLKSKLLERVFVHGDDLSGFYQEIDENILPSDFGGTLPKYDGKAVAEQLFGPQAQAENTAF

SEQ ID NO: 23018 - protein, 316 aa, Bos taurus
SEGAGTFRMVPEEEQELRAQLERLTTKDHGPVFGPCSQLPRHTLQKAKDELNEKEETREEAVRELQELVQAEAASGQELAVAVAERVQGKDSAFFLRFIRARKFHVGRAYELLRGYVNFRLQYPELFDSLSPEAVRCTVEAGYPGVLSTRDKYGRVVMLFNIENWDSEEITFDEILQAYCVILEKLLENEETQINGFCIIENFKGFTMQQAAGLRPSDLRKMVDMLQDSFPARFKAIHFIYQPWYFTTTYNVVKPFLKSKLLQRVFVHGEDLSSFYQEFDEDILPSDFGGTLPKYDGKAVAEQLFGPRDQTENTAF

SEQ ID NO: 23019 - protein, 317 aa, Bos taurus
MSEGAGTFRMVPEEEQELRAQLERLTTKDHGPVFGPCSQLPRHTLQKAKDELNEKEETREEAVRELQELVQAEAASGQELAVAVAERVQGKDSAFFLRFIRARKFHVGRAYELLRGYVNFRLQYPELFDSLSPEAVRCTVEAGYPGVLSTRDKYGRVVMLFIIENWDSEEITFDEILQAYCVILEKLLENEETQINGFCIIENFKGFTMQQAAGLRPSDLRKMVDMLQDSFPARFKAIHFIYQPWYFTTTYNVVKPFLKSKLLQRVFVHGEELSSFYQEFDEDILPSDFGGTLPKYDGKAVAEQLFGPRDQTENTAF

SEQ ID NO: 23020 - protein, 280 aa, Plasmodium falciparum 3D7
MCVYHYYVHYHKNNLKSLRYIFCGKELDDFEKQKIRELKEFVNKLKLKEKDKEKDKEKEVETYQTIFKNTLFDDDNYVLRFLQGNEFVFERCYNDMLRHLTWRKENLPIPLSDVQIFLDKGYCYIHGRDKQMHPIIIINCKNIISANTKDVLKVLYYWLEFCISKLLIEGKVEQWRVIIDLTSCSVLNIPIATLKDISKNLSCNYRSRLCKMLVLSAPLVVTGIWHMLKSIIPVVTQQKITITSSEKEKKLLDQVQANQLEKKFGGTCENATDFTEPILP

SEQ ID NO: 23021 - protein, 259 aa, Triticum aestivum
  unsure (1)..(259): unsure at all Xaa locations
MDCGTDERQYGHGGDRDAAEWKKVAELREFVEAQDPSAKEEDDFALRRFLRARDHNINKASVMLLRYLAWKRVTKPHGFISDDEVRGEIAKGRDRHQGFDRLGRPMSYLYSGRHFPVRRDHEDLKRYVVYVFNKICTKLPAGQEKFAAVIDLKGWGYANCDIRGYLAGLDIMQSYYPDRLGRVFLIHVPYLFMAAWKIVFPLIDDKTKKKFVFVADRDLDATLRDAIDESQLPEEYGGKLKXLGLQQFTIVQVHLMINR

SEQ ID NO: 23022 - protein, 175 aa, Triticum aestivum
  unsure (1)..(175): unsure at all Xaa locations
GRFLRARDHNIGKASAMLLQYLSWKRVAKPHGSISADEVRDEIAKDRVRMQGFDRLNRPMAYLYGARHFPARRDLDEFKRYVTYVLDKICTRLPVGQEKFAAVIDMKGWGYANCDIRGYVAALEIMQGYYPERLGRVFLIHVPYMFMAAWKMVYPFIDDRTRKKFVFVTDKDLKX

SEQ ID NO: 23023 - protein, 154 aa, Triticum aestivum
  unsure (1)..(154): unsure at all Xaa locations
MSANTAXGDGGEAEWKKVVELRAVAEAQDPAAKEEDDFVLRRFLRARDYNIGKASMMLLQYLAWKRVAKPHGSISDEEVRGEIAKKRVDMQGFDCLGRPMAYIYGARHFPARRDLDGFKRYVAYVLDKICTMLPVGXEKFAAVIDLKGWGYANX

SEQ ID NO: 23024 - protein, 303 aa, Triticum aestivum
  unsure (1)..(303): unsure at all Xaa locations
SREPSSRASRSVSSQQRPSASTYLVARFPSSRANQSRTAGRLRQEGKRQGLRRRGGGEAERACRRRRRPGRVDDGGRAPGGATRRXVPAARRAPAPRRRRXLRTRGPNVGKAAAMFLKSLPWTRATQPRGSITEAAVRGELVQDKLYVQGFDSAGRPLVYLFGHRLVAAGRPLEFKRYVVYILDNTCTKLPAGPDYDIRAKLAALGGLPNCDPRPLRPAFLILLPYVPVRPGRVVLPLVPYVFMAAWKMVYPFIDDNTKKKFVFVADKDLDATLRDAIDVSQLPEQYGGKLRLEGYKSSSTCN

SEQ ID NO: 23025 - protein, 120 aa, Triticum aestivum
  unsure (1)..(120): unsure at all Xaa locations
MDCGGEEQARQNGHAGDGGDPAEWKKVAELRAVVEAQDPAAKEEDDFMLRRFLRARDHNISKASAMFLKYLSWKRGAKPRGSITEAEVRGELVQDKLYIQGFDKTGRPMIYLFGNRHFAX

SEQ ID NO: 23026 - protein, 129 aa, Triticum aestivum
  unsure (1)..(129): unsure at all Xaa locations
KFASVVDLKGWGYANCDIRAKLAALEIMQNYYPERLGRVXLIHVPYVFMAAWXMXYPFIDDNTKXKFXFVADKDLDGTLRDAIDLSQLPEQYGGKLRLEGYKNNAIVNVXLIWFIKGVQLCESMLHCPA

SEQ ID NO: 23027 - protein, 282 aa, Zea mays
  unsure (1)..(282): unsure at all Xaa locations
PHDPPPTRPPAAEVVGHGGAGAARAGGXRRRGXEWKQVAELRAVTQAQDPSCKDEDDYTLRRFLRARDHNIGKASAMLLKYLKWKPAAKPHGAIAAAEVAREAAQGKLYLQGHDREGXRPLIYGFGARHHPARRDLDEFKRYVVHVLDATVARLPPPPPPPGDARQEKFAAVADLAGWGYANCDIRGYLAALDIMQSYYPERLARVFLVHVPYVFMAAWKIVYPFIDDNTKKKFVFVPDKDLDRTLREAIDDSQLAEIYGGKLKLVAPPANXTATTENGSIP

SEQ ID NO: 23028 - protein, 169 aa, Zea mays
  unsure (1)..(169): unsure at all Xaa locations
XSQDKLCMGGVDRAGRPILVAFAARHFSAGRDMAEFKSFVVYFFDKICARIPRGQEKFLCIVDLKGWGYSNCDVRAYIAAIEILQNYYPERLGKALMIHVPYIFMKAWKMIYPFIDTNTRDKFVFVEDKSLQETLRREIDEGQLPEFLGGKMDVIPLKDYGVQQQPQAV

SEQ ID NO: 23029 - protein, 175 aa, Zea mays
  unsure (1)..(175): unsure at all Xaa locations
MGGVDRTGRPIIVGLPPSHYSANRDMAEFKSFVVYFFDKICARIPRGQEKFLAIMDLKGWGYANCDVRAYIAAIEIMQNYYPERLGKALMINVPYIFLKVWKTMIYPFIDANTRDKFVFVDDKSLRETLRREIDESQLPEFLGGKMPLVSLKDYAQQPQPVCDVSRSXDVPARGP

SEQ ID NO: 23030 - protein, 362 aa, Zea mays
  unsure (1)..(362): unsure at all Xaa locations
RPTRPLANPIPDPDSPLASRSLAAAPSFSPIGSATLESRPRRYRLSGSGAPSSTPPPPSSIPPVQGPSLVYRAVLFGGLSNDVISAGALGITTAQLVRINDLHSRTVHQENALSNRLATLQEDIANRPLLPIVRQRELATATRLGAAASGSCDGAARRWLRAARLGEXRAGIVEAVDNLTLRRFLRARDHDVDKASAMFLKFLKWRREAAPGGSVPEEQVRRELSQDKLCMGGVDRAGRPILVAFAARHFSAGRDMAEFKSFVVYFFDKICARIPRGQEKFLCIVDLKGWGYSNCDVRAYIAAIEILQYFYRKKGGRVNKVHTKKAAAPKIAKQESSDDDTSDETFESDEFSEFLDANSSSH

SEQ ID NO: 23031 - protein, 177 aa, Zea mays
  unsure (1)..(177): unsure at all Xaa locations
MANAGGGAAGEGEWLKVAQLRALVQEDHRAKEVDNLTLRRFLRARGHNVDKAAAMLLKFLRWRAEAAPRXGGTVREEQVRGELEQDKIYMGGVVRTGRPIIVGLLAKHYSANRDMAEFKSFVVYFFDKICARIPRGQEKFLAIMDLKGWGYANCDVRAYIAAIEIMQNYYXVRPCPR

SEQ ID NO: 23032 - protein, 388 aa, Schizosaccharomyces pombe
MFSRLWVRCRCSTALSAAAAGTFFFRRSQKQPEPETVDEKVSFESYSPLKLMIQKTWPRFQEHKEYRESFIRLAKCDSPDAILVRFLASCNNDSHEASQKLINTLQWRVDTGVERIVERGELYAKETNDDQFLEQLRTGKVTMLGRDLSDRPICYIQVHLHQPSKLTQNSLREMTVWVMETMRLFLRPQKTLKDSMDSPQNVNVLFDLSNFSLHNMDYSFVKYLASCLEYYYPQSLGVCILHKSPWIFRSVWNIIKGWIKPEIAAKIVFTQSANDLEKYIDYSVIPTSLGGGNKKIFQYIEPVEHENDAVIEDSAEKTAALARYYAYFSEWEQHSLNWAKLDDDDAQNEKVRLCCDAAGTNFANCYWNVDKYIRARTVYDRLKWIGNV

SEQ ID NO: 23033 - protein, 304 aa, Saccharomyces cerevisiae
MVTQQEKEFLESYPQNCPPDALPGTPGNLDSAQEKALAELRKLLEDAGFIERLDDSTLLRFLRARKFDVQLAKEMFENCEKWRKDYGTDTILQDFHYDEKPLIAKFYPQYYHKTDKDGRPVYFEELGAVNLHEMNKVTSEERMLKNLVWEYESVVQYRLPACSRAAGHLVETSCTIMDLKGISISSAYSVMSYVREASYISQNYYPERMGKFYIINAPFGFSTAFRLFKPFLDPVTVSKIFILGSSYQKELLKQIPAENLPVKFGGKSEVDESKGGLYLSDIGPWRDPKYIGPEGEAPEAFSMK

SEQ ID NO: 23034 - protein, 296 aa, Saccharomyces cerevisiae
QQEKEFLESYPQNCPPDALPGTPGNLDSAQEKALAELRKLLEDAGFIERLDDSTLLRFLRARKFDVQLAKEMFENCEKWRKDYGTDTILQDFHYDEKPLIAKFYPQYYHKTDKDGRPVYFEELGAVNLHEMNKVTSEERMLKNLVWEYESVVQYRLPACSRAAGHLVETSCTIMDLKGISISSAYSVMSYVREASYISQNYYPERMGKFYIINAPFGFSTAFRLFKPFLDPVTVSKIFILGSSYQKELLKQIPAENLPVKFGGKSEVDESKGGLYLSDIGPWRDPKYIGPEGEAPE

SEQ ID NO: 23035 - protein, 408 aa, Saccharomyces cerevisiae
MSFDRQLTEDQEVVLKQIWTHLFHLWQVPVDGTHIFPNNSLHSSSTPAKKKKSSWFSKLQSSDHTQDSSEAAEAAHLYEKGKIHKALANLDPQTTKKQFWHDIKNETPDATILKFIRARKWNADKTIAMLGHDLYWRKDTINKIINGGERAVYENNETGVIKNLELQKATIQGYDNDMRPVILVRPRLHHSSDQTEQELEKFSLLVIEQSKLFFKENYPASTTILFDLNGFSMSNMDYAPVKFLITCFEAHYPESLGHLLIHKAPWIFNPIWNIIKNWLDPVVASKIVFTKNIDELHKFIQPQYIPRYLGGENDNDLDHYTPPDGSLDVHLKDTETRAMIEKEREELVEQFLTVTAQWIEHQPLNDPAYIQLQEKRVQLSTALCENYSKLDPYIRSRSVYDYNGSLKV

SEQ ID NO: 23036 - protein, 310 aa, Saccharomyces cerevisiae; identical to SEQ ID NO: 670

SEQ ID NO: 23037 - protein, 653 aa, Neurospora crassa
MRLPPPSTPTQLLRLRLTRSALSRSAVSTTSPLATSTCPSSQRTVSTKVGAATITPGLRFQSLLFPPSTGITTTTTTTTTAFFSRNNLSTSTTTVNKRDQTVKPTVTLAPSTPVVLRASVTGLGLLFVLGLGLGYGITGFLGQKSTEQQELPSEASYTTIQNNIQDILDDESSTTNMSREIAPGRPGNLTPEQEEKLKQLWKLIFQVCGVSSPSPSSESSTPAATSDDVSIKGDDKKKKSKLSMFSRKHKKDSDDTTPDSASTASGSMPGSPAIVLNASTTSGDDDKYNQLSKFHETLASQSPAAIRETIWSMVKHDHPDALVLRFLRARKWDVEKALVMFISTMNWRDNEMKVDADIMRSGEGGAAEAEKMEAKTSEEIAKKKLAIDFLTQTRMGKSYVHGVDKQGRPICFVRVRLHKQGEQSEESLERYTVYLIETCRMLLQGSVDTATIVFDMTGFSMANMDYAPVKFMVKCFEANYPECLGAVLVHKAPWIFQGIWRVIRGWLDPVVANKVHFTNNISEMSEFISPEKLPKDLDGQEDWEYKYVEPVPGENDRMKDEETISKLQAARAELVKEYEEATLQWIQASGNSEELKKKRDAIAEKLRVDYWNLDPYVRARSFYDRIGVLLPGGKLDPFLEGKKDGLAVRVVGV

SEQ ID NO: 23038 - protein, 327 aa, Macaca fascicularis
MTHLQAGLSPETLEKARLELNENPDTLHQDIQEVRDMVITRPDIGFLRTDDAFILRFLRARKFHHFEAFRLLAQYFEYRQQNLDMFKSFKATDPGIKQALRDGFPGGLANLDHYGRKILVLFAANWDQSRYTLVDILRAILLSLEAMIEDPELQVNGFVLIIDWSNFTFKQASKLTPSMLRLAIEGLQDSFPARFGGIHFVNQPWYIHALYTVIRPFLKEKTRKRIFLHGNNLNSLHQLIHPEILPSEFGGMLPPYDMGTWARTLLDHEYDDDSEYNVDSYSMPVKEVEKELSPKSMKRSQSVVDPTVLKRMDKNEEENMQPLLSLD

SEQ ID NO: 23039 - protein, 327 aa, Macaca fascicularis
MTHLQAGLSPETLEKARLELNENPDTLHQDIQEVRDMVITRPDIGFLRTDDAFILRFLRARKFHHFEAFRLLAQYFEYRQQNLDMFKSFKATDPGIKQALKDGFPGGLANLDHYGRKILVLFAANWDQSRYTLVDILRAILLSLEAMIEDPELQVNGFVLIIDWSNFTFKQASKLTPSMLRLAIEGLQDSFPARFGGTHFVNQPWYIHALYTVIRPFLKEKTRKRIFLHGNNLNSLHQLIRPEILPSEFGGMLPPYDMGTWARTLLDHEYDDDSEYNVDSYSMPVKEVEKELSPKSMKRSQSVVDPTVLKRMDKNEEENMQPLLSLD

SEQ ID NO: 23040 - protein, 802 aa, Mus musculus
MAHRCLLLWSRGGCRRGLPPLLVPRGCLGPDRRPCLRTLYQYATVQTASSRRSLLRDVIAAYQRFCSRPPKGFEKYFPNGKNGKKASEPKEAVGEKKEPQPSGPQPSGGAGGGGGKRRGKKEDSHWWSRFQKGDFPWDDKDFRMYFLWTALFWGGVMIYFVFKSSGREITWKDFVNNYLSKGVVDRLEVVNKRFVRVTFTPGKTPVDGQYVWFNIGSVDTFERNLETLQQELGIEGENRVPVVYIAESDGSFLLSMLPTVLIIAFLLYTIRRGPAGIGRTGRGMGGLFSVGETTAKVLKDEIDVKFKDVAGCEEAKLEIMEFVNFLKNPKQYQDLGAKIPKGAILTGPPGTGKTLLAKATAGEANVPFITVSGSEFLEMFVGVGPARVRDLFALARKNAPCILFIDEIDAVGRKRGRGNFGGQSEQENTLNQLLVEMDGFNTTTNVVILAGTNRPDILDPALLRPGRFDRQIFIGPPDIKGRASIFKVHLRPLKLDSALEKDKLARKLASLTPGFSGADVANVCNEAALIAARHLSDAINEKHFEQAIERVIGGLEKKTQVLQPEEKKTVAYHEAGHAVAGWYLEHADPLLKVSIIPRGKGLGYAQYLPKEQYLYTKEQLLDRMCMTLGGRVSEEIFFGRITTGAQDDLRKVTQSAYAQIVQFGMNEKVGQISFDLPRQGDMVLEKPYSEATARMIDDEVRILISDAYRRTVALLTEKKADVEKVALLLLEKEVLDKNDMVQLLGPRPFTEKSTYEEFVEGTGSLDEDTSLPEGLQDWNKEREKEEKKEKEKEEPLNEKVVS

SEQ ID NO: 23041 - protein, 663 aa, Mus musculus
MQKGEFPWDDKDFRSLAVLGAGVAAGFLYFYFRDPGKEITWKHFVQYYLARGLVDRLEVVNKQFVRVIPVPGTTSERFVWFNIGSVDTFERNLESAQWELGIEPTNQAAVVYTTESDGSFLRSLVPTLVLVSILLYAMRRGPMGTGRGGRGGGLFSVGETTAKILKNNIDVRFADVAGCEEAKLEIMEFVNFLKNPKQYQDLGAKIPKGAMLTGPPGTGKTLLAKATAGEANVPFITVNGSEFLEMFVGVGPARVRDMFAMARKHAPCILFIDEIDAIGRKRGRGHLGGQSEQENTLNQMLVEMDGFNSSTNVVVLAGTNRPDILDPALTRPGRFDRQIYIGPPDIKGRSSIFKVHLRPLKLDGSLSKDALSRKLAALTPGFTGADISNVCNEAALIAARHLSPSVQERHFEQAIERVIGGLEKKTQVLQPSEKTTVAYHEAGHAVVGWFLEHADPLLKVSIIPRGKGLGYAQYLPREQFLYTREQLFDRMCMMLGGRVAEQLFFGQITTGAQDDLRKVTQSAYAQIVQFGMSEKLGQVSFDFPRQGETMVEKPYSEATAQLIDEEVRCLVRSAYNRTLELLTQCREQVEKVGRRLLEKEVLEKADMIELLGPRPFAEKSTYEEFVEGTGSLEEDTSLPEGLKDWNKGREEGGTERGLQESPV

SEQ ID NO: 23042 - protein, 672 aa, Rattus norvegicus
MVKIVNSDFPVAVNISGPLGTPAPEPLRLYQYATVQTANSRSSLLRDVIAAYQRFCSRPPKGFEKYFPNGKNGKKASESKEAVGEKKESQLSGPQSSGGASGGGGKRRGKKEDSHWWSRFQKVDRLEVVNKRFVRVTFTPGKTPVDGQYVWFNIGSVDTFERNLETLQQELGIEGENRVPVVYIAESDGSFLLSMLPTVLIIAFLLYTIRRGPAGIGRTGRGMGGLFSVGETTAKVLKDEIDVKFKDVAGCEEAKLEIMEFVNFLKNPKQYQDLGAKIPKGAILTGPPGTGKTLLAKATAGEANVPFITVSGSEFLEMFVGVGPARVRDLFALARKNAPCILFIDEIDAVGRKRGRGNFGGQSEQENTLNQLLVEMDGFNTTTNVVILAGTNRPDILDPALLRPGRFDRQIFIGPPDIKGRASIFKVHLRPLKLDSALEKDKLARKLASLTPGFSGADVANVCNEAALIAARHLSDAINEKHFEQAIERVIGGLEKKTQVLQPEEKKTVAYHEAGHAVAGWYLEHADPLLKVSIIPRGKGLGYAQYLPKEQYLYTKEQLLDRMCMTLGGRVSEEIFFGRITTGAQDDLRKVTQSAYAQIVQFGMNEKVGQISFDLPRQGDMVLEKPYSEATARMIDDEVRILISEAYKRTVALLTEKKADVEKECCEIRLES

SEQ ID NO: 23043 - protein, 628 aa, Nostoc sp. PCC 7120
MKFSWRVLVLWTLPALVIGFFFWQGTFAGAPADMSKNAANTRMTYGRFLEYVDAGRVTSVDLYEGGRTAIVEAQDQDIENRVQRWRVDLPVSAPELISKLKDKKVSFDAHPARNDGAIWGLLGNLVFPILLITGLFFLFRRSNNLPGGPGQAMNFGKSKARFQMEAKTGVKFDDVAGIEEAKEELQEVVTFLKQPERFTAVGARIPKGVLLVGPPGTGKTLLAKAIAGEAGVPFFSISGSEFVEMFVGVGASRVRDLFKKAKDNAPCIIFIDEIDAVGRQRGAGIGGGNDEREQTLNQLLTEMDGFEGNTGIIIIAATNRPDVLDAALLRPGRFDRQVTVDAPDIKGRLEVLQVHARNKKLDPSVSLEAIARRTPGFTGADLANLLNEAAILTARRRKEGITLSEIDDAVDRVVAGMEGTPLVDSKSKRLIAYHEVGHALVGTLLKDHDPVQKVTLIPRGQAQGLTWFTPNEEQGLISRSQLKARITGALGGRAAEEIIFGSAEVTTGAGGDLQQVSGMARQMVTRFGMSDLGPLSLESQQGEVFLGRDWMTRSDYSESIAARIDSQVRLIVDECYQNAKKIMREHRTVTDRIVDLLIEKETIDGEEFRQIVAEYTDVPDKQQFVPQL

SEQ ID NO: 23044 - protein, 656 aa, Nostoc sp. PCC 7120
MAIFARRIGLNQHSAYGSRQRVIVMKNFGKKALIKQQSPKRVAWTGALAASLIMLPTMFGGNPVLAQKAERESLSYGELIQKVNQEQVKRVELDETEQIAKVYLKGQKPDAPPIQVRLLEQNNELINRLKEKNVDFGEISSANSRAAVGLLINLMWILPLVALMLLFLRRSTNASSQAMNFGKSRARFQMEAKTGVKFDDVAGIEEAKEELQEVVTFLKQPERFTAVGARIPKGVLLVGPPGTGKTLLAKAIAGEAAVPFFSISGSEFVEMFVGVGASRVRDLFKKAKDNAPCLIFIDEIDAVGRQRGTGIGGGNDEREQTLNQLLTEMDGFEGNTGIIIIAATNRPDVLDSALLRPGRFDRQVIVDAPDLKGRLEILQVHSRNKKVDPSVSLEAIARRTPGFTGADLANLLNEAAILTARRRKEAITILEIDDAVDRVVAGMEGTPLVDSKSKRLIAYHEVGHGLVGTLLKDHDPVQKVTLIPRGQAQGLTWFTPNEEQGLISRSQLKARITSTLAGRAAEEIVFGKPEVTTGAGDDLQKVTSMARQMVTKFGMSELGPLSLENQSGEVFLGRDWMNKSDYSEEIAAKIDSQVREIINTCYQTSKELLQTNRVVMERLVDLLTEQETIEGDLFRKIVSESQNPVVDEQLSMVNSQ

SEQ ID NO: 23045 - protein, 633 aa, Rhodobacter sphaeroides
MGNARNIAFWVVLFLLILALFNLFSGGQTTSSSRTISYSDFIARVDNGEVSSVTLDGERVMVRGKDGTQYVAIKPQGEEVTDRLINHGVEVRAEAQEQSGFFSLISLWLPFLVLIGIWIFFMNRMQGGGRGGAMGFGKSRAKLLTEKQGRVTFDDVAGIDEAKEELEEIVEFLRNPQKFSRLGGKIPKGALLVGPPGTGKTLLARAIAGEAGVPFFTISGSDFVEMFVGVGASRVRDMFEQAKKNAPCIVFIDEIDAVGRARGVGIGGGNDEREQTLNQLLVEMDGFEANEGVIIVAATNRKDVLDPALLRPGRFDRTIHVPNPDIKGREKILSVHARKVPLGPNVDLRLIARGTPGFSGADLMNLVNEAALLAARVGRRFVTMDDFENAKDKVMMGAERRSMVLTADQKEKTAYHEAGHAIVGLNLPKCDPVYKATIIPRGGALGMVVSLPEMDRLNMHKDEGKQKIAMTMAGKAAEIIKYGEEAVSSGPAGDIQQASALARAMVMRWGMSDVVGNIDYAEAHEGYQGNTAGFSVSAETKKMIEAEVKRLIDEGYQTAYRILTEKSEEFERLAKGLLEYETLTGDQIRRVIAGEPIDSDDDADRPVGGGSVAAIPKTRPKVIKADGGLEPSV

SEQ ID NO: 23046 - protein, 643 aa, Rhodospirillum rubrum
MKDLNLSRNLLLWIIIAVLLVVLFNLFQTSAPRGPQTTVPYSDFLSSVDAREVRDVVIKGDSISGHTTDGRAFTTYAPRDADMVSHLRDSGVQISAVPAEDNVPTFWSILISWFPFLLLIGVWIFFMRQMQSGGGKAMGFGKSRAKLLTEKTGRVTFDDVAGIDEAKQELEEVVEFLRDPQKFQRLGGKIPKGVLLVGPPGTGKTLLARAIAGEANVPFFTISGSDFVEMFVGVGASRVRDMFEQGKKNAPCLIFIDEIDAVGRHRGAGLGGGNDEREQTLNQLLVEMDGFEANEGVILIAATNRPDVLDPALLRPGRFDRQVTVSNPDIMGREKILKVHMRKTPLGPDVDAKVIARGTPGFSGADLSNLVNEAALLAARKGKRVVTMAEFEEAKDKVLMGAERRSMVMTEDEKEKTAYHEAGHALIAIHQEGHDPLHKVTIIPRGRALGVTMSLPERDRYGYSLKELKARIAMAFGGRVAEEMIYGTENVTTGASNDIMQATDLARRMVTEFGFSEKLGPLRYTDNQEEVFLGHSVTQHKNLSDETARMIDEEVRRFVEQGEARAREILGKYKDELEIITRGLLEYETLSGDEVNKLLRGEDLNRAEQPAPPRDRSGRRASVPTSGPAAGGVGGDPEPQPGA

SEQ ID NO: 23047 - protein, 627 aa, Synechocystis sp. PCC 6803
MKFSWRTALLWSLPLLVVGFFFWQGSFGGADANLGSNTANTRMTYGRFLEYVDAGRITSVDLYENGRTAIVQVSDPEVDRTLRSRVDLPTNAPELIARLRDSNIRLDSHPVRNNGMVWGFVGNLIFPVLLIASLFFLFRRSSNMPGGPGQAMNFGKSKARFQMDAKTGVMFDDVAGIDEAKEELQEVVTFLKQPERFTAVGAKIPKGVLLVGPPGTGKTLLAKAIAGEAGVPFFSISGSEFVEMFVGVGASRVRDLFKKAKENAPCLIFIDEIDAVGRQRGAGIGGGNDEREQTLNQLLTEMDGFEGNTGIIIIAATNRPDVLDSALMRPGRFDRQVMVDAPDYSGRKEILEVHARNKKLAPEVSIDSIARRTPGFSGADLANLLNEAAILTARRRKSAITLLEIDDAVDRVVAGMEGTPLVDSKSKRLIAYHEVGHAIVGTLLKDHDPVQKVTLIPRGQAQGLTWFTPNEEQGLTTKAQLMARIAGAMGGRAAEEEVFGDDEVTTGAGGDLQQVTEMARQMVTRFGMSNLGPISLESSGGEVFLGGGLMNRSEYSEEVATRIDAQVRQLAEQGHQMARKIVQEQREVVDRLVDLLIEKETIDGEEFRQIVAEYAEVPVKEQLIPQL

SEQ ID NO: 23048 - protein, 665 aa, Synechocystis sp. PCC 6803
MSHRPRSDRHSFSSPSRFWHRLGMGLLVAGTLALPVSTLAQEGGEGAQPKASPSPIQSPNSSNGEATPRSFFNSGSPRSAEPKMNYGQLIDAIKANQVAKVEVDTNRRQAIVTLKDAPPGSKPQTVQLLDNNPELLNLLRSRSETIDLDINRTPDNSALYGLLTNLLVVAILIGLVVMVVRRSANASGQAMSFGKSKARFQMEAKTGVGFDDVAGIDEAKEELQEVVTFLKQPEKFTAIGAKIPRGVLLIGPPGTGKTLLAKAIAGEAGVPFFSISGSEFVEMFVGVGASRVRDLFKKAKENAPCLVFIDEIDAVGRQRGVGYGGGNDEREQTLNQLLTEMDGFEGNSGIIVIAATNRPDVLDLALLRPGRFDRQVTVDYPDVQGRELILAIHAQNKKLHEEVQLAAIARRTPGFTGADLANVLNEAAIFTARRRKEAITMAEVNDAIDRVVAGMEGTPLVDSKSKRLIAYHEVGHALIGTLCPGHDPVEKVTLIPRGQAQGLTWFTPDEDQSLMTRNQMIARIAGLLGGRVAEEVIFGDDEVTTGAGNDIEKITYLARQMVTKLGMSSLGLVALEEEGDRNFSGGDWGKRSEYSEDIAARIDREIQAIVTAAHQRATRIIEENRNLMDLLVDALIDQETIEGEHFRQLVESYQQSQKQPALAGK

SEQ ID NO: 23049 - protein, 910 aa, Chlamydophila pneumoniae CWL029
MSKDKKMKPEPKKNFPTVFFFLLFGVVFGVVAFQNFLAGKKARVGFSHQIEHLVNLRLIVPEDSHKIALNDNLVSFGGRFRDVQTQEGQLRYHYLELIDQGHRLDLDLQETSKSLTTLGKEVTNSILWFSAISGSPIPEQGYAISYPSEVSGSVLTEPLVVTGPATPQLINLHSLQERYPTLSRSPEALRTYGSDLYELIGKYLSPVLGIGSETLKRELKDLYQQVEVSLTQETDTEAAYTLYGQVLSTLNRISSSLVVSEGGERFSQLRSVRLYREEWNKYHKLVEARDLNQAQLEKLRGELSQTVWYFNNQELSSRSLEKQDPEVFGHWFAGAKEEWTAFKFNHSLSFKAPDQPRNLVLEKTFKSQEPSPHYLGYLFTFLPIILVLLFVYLVFSRQMRGMSGSAMSFGKSPARMLLKGQNKVTFADVAGIEEAKEELIEIVDFLKNPNKFTSLGGRIPKGVLLIGPPGTGKTLIAKAVSGEADRPFFSIAGSDFVEMFVGVGASRIRDMFEQAKRNAPCIIFIDEIDAVGRHRGAGIGGGHDEREQTLNQLLVEMDGFGTNEGVILMAATNRPDVLDKALLRPGRFDRRVVMNLPDIKGRFEILMVHAKRIKLDPTVDLMAVARSTPGASGADLENLLNEAALLAARKDRTAVTAVDVAEARDKVLYGKERRSLEMDAEERKTTAYHESGHAVVGLCVQHGDPVDKVTIIPRGLSLGATHFLPEKNKLSYWKKELYDQLAVLMGGRAAEEIFLGDISSGAQQDISQATKLVRSMVCEWGMSPQLGNVTYDERSDGLTGYGGYHEKSYSEETAKTIDTELRMLLDAAYQRALDIINEHKAEIELMTQMLIEFETLDSKDVKEIMDHTWDPEKKRARLKEEGMLFKKSSDDLPPPPPKEDTLPGLGFNAT

SEQ ID NO: 23050 - protein, 611 aa, Thermoanaerobacter tengcongensis
MKDNNKIFRSMVLYLLIFIAIYAMVQLYSQATPQVTKIDYGELVRYISANQIKSITLSGNQVKGVFKNGTEFESSVPDITNFMSFVDPYILEGKLDFKYEPQVGPPWWVQMLPSLFLVGVLILFWYIFMQQAQGGGGSRVMSFGKSRARMVTDKDKRVTFNDVAGADEEKEELQEIVEFLKYPKKFIELGARIPKGVLLVGPPGTGKTLLARAVAGEAGVPFFSISGSDFVEMFVGVGAARVRDLFEQAKKNAPCIVFIDEIDAVGRQRGAGLGGGHDEREQTLNQLLVEMDGFSVNEGIIVIAATNRPDILDPALLRPGRFDRHIVVNIPDIKGREEILKVHARNKPLAPDVSLQVIARRTPGFTGADLENVMNEAALLAARKGLKQITMAELEEAITRVVAGPEKRSRIMSEKDKKLVAYHEAGHAVVAKLLPTTPPVHEVTIIPRGRAGGYTMLLPEEDKYYMSKSEMMDEIVHLLGGRAAEKLVLNDISTGAQNDIERATNIARKMVTEYGMSDRLGPMTFGTKSEEVFLGRDLGRTRNYSEEVAAEIDREIRRIIEEAYKRAESLLQENIDKLHRVAKALMEKEKLNGEEFEKVFNGEEIEGVSFA

SEQ ID NO: 23051 - protein, 510 aa, Thermoanaerobacter tengcongensis
MKKNLHTIILVMSIFVNILLLYLFITEVNPNLSLNLTFLLIAAATAIAYILLKNKFSELMPVKYNSLSEINEEVTKKKGNITFKDVAGLDEVIEELKVIIDFMTNTEKYNKMGAKIPKGILFYGPPGTGKTLLATALAGETNSTFISASGSEFVEKYVGVGASRIRALFAKAKKNAPSIIFIDEIDAVGTKRNTDNNSEKDQTLNQLLVEMDGFNSNEGIIVIGATNRIDMLDEALLRPGRFDRTIHIGPPNLKGRLEILKVHTRNKPLDESVSLVDLARKTHGMTGAHLATMCNEAAILAVMRNKTKIGKEEFEEALERVIAGLKKKNPSGLEKERTIAAYHEAGHALIGKILNVNVIEKISIVPRGEALGYVLNFPKDDSFLLTKTELKNKITMLLGGRASEEIIFNEISTGAENDLKEATKIAYQMVCNFGMSELGNRVFDLHLVKSTEMIDKEVDKIINSCYTFARKILLEHKDKVIAIAEKLLEKETITKEELEEIIEEKTSMCV

SEQ ID NO: 23052 - protein, 492 aa, Thermoanaerobacter tengcongensis
MVREILLGIAIAFTIFAAFLGINVMPIVFLMAAFLLLSHLIENRGLVPANKNIVNPESEVSFEDIGGQNTAISELKEALDFVVNREKIAQMGIRPIKGILLIGPPGTGKTLLAKAAAKYTNSSFIATSGSEFIEMYAGVGAQRVRHLFETAKSLAKKEGKNSAIIFIDEIDILGAKRGTHESHHEYDQTLNQLLVEMDGIKNNGDVNILVIAATNRPDLLDPALLRPGRFDRQVVVDLPDKNGRLQILKIHTKNKPLGEDVNLEEIAESTFGFSGAHLENLCNEAAILALRDGSPSILQKHFKEAIDKVILGEKSDRKPTEEELYRIAVHEAGHAIVGEEVNPGSVAVITIVPRGRALGFVRQAEKKDLLIYTKEQLEKDIMVALGGTVAEVLVLGGRSTGSANDFEQAVDIAKKIVFTGLSDLGIVSKEDISKEKVNEEVNKIVKNLEDKVKEILERRLEKLKEVAELLKKEEAISGEKLREILNKEEVLA

SEQ ID NO: 23053 - protein, 217 aa, Paracoccidioides brasiliensis
PRAVSVRAVSSARPSTSDPRYASGRLTRCHRLAPDRDGRQAILRIHTRDMPLAPDVDLPQVARMTPGMTGAELANLANESALLAVKRQQQQVAQHDFLEGLEKVQLGAARSLLMPEEERRRTGYHESGHALLGMLQPGADPVRKVTIVPRGRALGVTLSTPEADRYAYTEEYLRARIIGALGGMAAEHVVFGVVTTGSENDLEQVTGIARGMSPAGA

SEQ ID NO: 23054 - protein, 679 aa, Bacillus firmus
MNRIFRNTIFYLLIFLVIVGIVSVFNSDQTETENVSFNEFAERLENGQVQELSVKPERQVYLVRGQFNDQAEDEFFQTYALRSEQTAELLFNAEDPTGTPFNLEIEPADETSGWVQFFTGIIPFIIIFILFFFLLSQAQGGGSRVMNFGKSKAKMVNEDKKKAKFKDVAGADEEKQELVEVVEFLKDPRKFSAIGARIPKGVLLVGPPGTGKTLLARAVAGEAGVPFFSISGSDFVEMFVGVGASRVRDLFENAKKNAPCIIFIDEIDAVGRQRGAGLGGGHDEREQTLNQLLVEMDGFSANEGIIIIAATNRADILDPALLRPGRFDRQIQVNRPDVNGREEVLKVHARNKPLNDDVNLKTIATRTPGFSGADLENLLNEAALVAARHDHTKISMIHIEEAIDRVIAGPAKKSRVISPKEKKIVAWHEAGHTVVGVKLENADMVHKVTIVPRGMAGGYAVMLPKEDRYFMTQPELLDKIIGLLGGRVAEEVTFGEVSTGAHNDFQRATGIARKMVTEYGMSEKLGPMQFISGSGGQVFLGRDIQNEQNYSDAIAHEIDLEVQRIIKECYARCKQILLENKDSLDLVAKTLLDMETLDAEQIKSLVHEGKLPDDHHLNAHPEKEKASESDVKVNINSKKEETPQVEAEQPQEPNTDEPIEKDPSVEDNRSFEDDTNKKE

SEQ ID NO: 23055 - protein, 656 aa, Magnetococcus sp. MC-1
MVMLFNLFNSPQGPGQSITFSDFSEMVAQGKVTAVTLEGRTVRGLSTDGSPFSSRVPDNYDLTKDLLAHGVDIDVREPEGTPMLMQILISWFPMLLLIAVWIYFMRQMQSGGGRGAMSFGKSKAKLMSDKAAKVTFQDVAGIEEAKEELQEVVQFLKDPHKFQRLGGKIPKGVLLVGPPGTGKTLLARAIAGEANVPFFNLSGSDFVEMFVGVGAARVRDMFEQGKKNAPCIIFIDEIDAVGRHRGAGLGGGHDEREQTLNQLLVEMDGFESTEGVIMVAATNRPDVLDPALLRPGRFDRQVTVPNPDILGRTQILKVHMNKVPLSDSVDAEVIARATPGFSGADLANLVNEAALIAAQLDKRVVEMEDFENAKDKVMMGKPRRSAVISEKERKTTAYHEAGHAVVAMALDGADPVHKVTIIPRGRALGLTMQLPLEDRYTYSKVQLEQNIAILMGGRLAEELVLNQLTTGAGNDIQRATDLARKMICSYGMSDTLGPLTYGENEQEIFLGREITQHKSVSEETARRIDAEVFDIVDRNYKRAKQILTDKMEVLHTMAQALLERETIDADEVIKLMAGEPAETALKPLKKKDERANKPTPTVADDGEQGDQTAKDAVAGSVTQAEDDVEGSTRTATEASTQEVVSKDTPEGDDKDR

SEQ ID NO: 23056 - protein, 708 aa, Lactobacillus gasseri
MKNRRNRLLSNGLFYIIVFVILLAGINWAVGGSGSNGSTENIRYSQLVKDLKAGKVKSINVQPSNGVYTVTGSYKKAQKSKNQNNTGFGLIPSSQSSSEVTRFSTTMLQNDSMVKTVSDLAQKSGASISGQGESQSGTWISTIVMLVPTLIFIVMLWMMMNQGGQGRGGGMMNFGKSHVKPQDPSKNKVRFSDVAGEEEEKQELVEIVEFLKNPAKYTKLGARIPAGVLLEGPPGTGKTLLARAVAGEAGVPFYSISGSDFVEMFVGVGASRVRDLFETAKKNAPSIIFIDEIDAVGRKRGNGVSGGHDEREQTLNQLLVEMDGFEGDEGVIVMAATNRSDVLDPALLRPGRFDRKVLVGRPDVKGREAILKVHAKNKPLAPDVDLKEVARQTPGFVGADLENVLNEAALVAARRNKTEITASDIDEAEDRVIAGPAKKDTVISPEERKRVAYHEAGHAIVGLVLSDSRTVRKVTIVPRGRAGGYNIMLPKEDENIITKKQLMEQVAGLMGGRAGEEVVVGDKSTGASNDFEQATNIARGMVTQYGMTDVGMTELESPSMQVPYGTKPYSEATAAKIDEAVKEILDEGHKQAVDIIKSHRETHKIIAEALLKYETLNEKQILSLFKTGKMPENDENEFPSESKASTYEEAKAAMEKKDQQREETENKDDKEDVHPLPDDHKNIDDIPLNPPSEKKNSDEHNSDENKDK

SEQ ID NO: 23057 - protein, 687 aa, Listeria monocytogenes
MNRFFRNAIFYVIIFLVIIGIVASFNSNKEAAKDISYSEFVSKLEDGKVKSVEIQPDRSVYTINGEFKSSDKSSDDKKTGLGQSKTSSTAFTTYALNSDTSLGDLQKTLDKEDVKTTIVPAKQNSGWVTFLTSIVPFVIIFILFFFLMSQSQGGGGGKVMSFGKSKAKLYNDDKKKVRFTDVAGADEEKQELVEVVEFLKDPRKFADLGARIPKGVLLVGPPGTGKTLLARAVAGEAGVPFFSISGSDFVEMFVGVGASRVRDLFENAKKNAPCIIFIDEIDAVGRQRGAGMGGGHDEREQTLNQLLVEMDGFGGNEGIIIIAATNRADVLDPALLRPGRFDRQIMVDRPDVKGREAVLRVHARNKPLAKSVDLKAIAQRTPGFSGADLENLLNEAALVAARSDKKEIDMSDLDEASDRVIAGPAKKNRVISEKERRTVAYHEGGHVIVGMVLDEAEVVHKVTIVPRGQAGGYAVMLPKEDRFLMTKAELMDRITGLLGGRVAEEVTFGEVTTGASNDFERATELARRMVTEWGMSDKIGPLQFTSGNGQVFMGRDFGSDKGYSDKIAYEIDTEVQSLIRYCYDRAKTIITEHQEQHKLIAETLLKVETLDARQIRSLFDDGVMPPDIDTIDVEAEYPSEKDEEVAGKSFEEEKEELKEEEKIEEPKEVTSEDAPNIEQTPNDKKDE

SEQ ID NO: 23058 - protein, 690 aa, Listeria innocua
MNRFFRNAIFYVIIFLVIIGIVASFNSNKEAAKDISYSEFVSKLEDGKVKSVEIQPDRSVYTIEGEFKSSDKSSDDKKTGLGQSKTSSTAFTTYALNSDTSLGDLQKTLDKEDVKTTVVPAKQNSGWVTFLTSIVPFVIIFILFFFLMSQSQGGGGGKVMSFGKSKAKLYNDDKKKVRFTDVAGADEEKQELVEVVEFLKDPRKFADLGARIPKGVLLVGPPGTGKTLLARAVAGEAGVPFFSISGSDFVEMFVGVGASRVRDLFENAKKNAPCIIFIDEIDAVGRQRGAGMGGGHDEREQTLNQLLVEMDGFGGNEGIIIIAATNRADVLDPALLRPGRFDRQIMVDRPDVKGREAVLRVHARNKPLAKSVDLKAIAQRTPGFSGADLENLLNEAALVAARSDKKEIDMSDLDEASDRVIAGPAKKNRVISEKERRTVAYHEGGHVIVGMVLDEAEVVHKVTIVPRGQAGGYAVMLPKEDRFLMTKAELMDRITGLLGGRVAEEVTFGEVTTGASNDFERATELARRMVTEWGMSDKIGPLQFTSGNGQVFMGRDFGSDKGYSDKIAYEIDTEVQSLIRYCYDRAKTIITEHQEQHKLIAETLLKVETLDARQIRSLFDDGVMPPDIDTIDVEAEYPSEKDEEVAGKSFEEEKEDLKEEKVEETQDEPKEVTSEDAPNIEQTPNDKKDE

SEQ ID NO: 23059 - protein, 691 aa, Listeria monocytogenes EGD-e
MNRFFRNAIFYVIIFLVIIGIVASFNSNKEAAKDISYSEFVSKLEDGKVKSVEIQPDRSVYTINGEFKSSDKSSDDKKTGLGQSKTSSTAFTTYALNSDTSLGDLQKTLDKEDVKMNVVPAKQNSGWVTFLTSIVPFVIIFILFFFLMSQSQGGGGGKVMSFGKSKAKLYNDDKKKVRFTDVAGADEEKQELVEVVEFLKDPRKFAELGARIPKGVLLVGPPGTGKTLLARAVAGEAGVPFFSISGSDFVEMFVGVGASRVRDLFENAKKNAPCIIFIDEIDAVGRQRGAGMGGGHDEREQTLNQLLVEMDGFGGNEGIIIIAATNRADVLDPALLRPGRFDRQIMVDRPDVKGREAVLRVHARNKPLAKSVDLKAIAQRTPGFSGADLENLLNEAALVAARSDKKEIDMSDLDEASDRVIAGPAKKNRVISEKERRTVAYHEGGHVIVGMVLDEAEVVHKVTIVPRGQAGGYAVMLPKEDRFLMTKAELMDRITGLLGGRVAEEVTFGEVTTGASNDFERATELARRMVTEWGMSDKIGPLQFTSGNGQVFMGRDFGSDKGYSDKIAYEIDTEVQSLIRYCYDRAKTIITEHQEQHKLIAETLLKVETLDARQIRSLFDDGVMPPDIDTIDVEAEYPSEKDEEVAGKSFEEEREELKEEEKVEETQEEPKEVTSEDAPNIEQTPNDKKDE

SEQ ID NO: 23060 - protein, 769 aa, Mycobacterium smegmatis
  unsure (1)..(769): unsure at all Xaa locations
MNRKNVIRTLTVIGVVLLLGWSFFYFSDETRGYKPVDTTVALAQIRGDNVNSAQIDNREQQVRLDLKSGNGNTENSDKIITKYPTGYGLTLFNALQDKGAKTNTVVNQGSVFGTLLIYMLPLLMLVALFVMFSRMQTGGRMGFGFGKSRAKQLSKDMPKTTFADVAGVDEAVEELYEIKDFLQNPSRYQALGAKIPKGVLLYGPPGTGKTLLARAVAGEAGVPFFTISGSDFVEMFVGVGASRVRDLFEQAKQNSPCIIFVDEIDAVGRQRGAGLGGGHDEREQTLNQLLVEMDGFGDRQGVILIAATNRPDILDPALLRPGRFDRQIPVSNPDLAGRRAVLKVHSQGKPIAPDADLDGLAKRTVGMSGADLANVINEAALLTARENGTVITGPALEEAVDRVVGGPRRKSRIISEHEKKITAYHEGGHTLAAWAMPDIEPIYKVTILARGRTGGHAVAVPEDDKGLMTRSEMIARLVFAMGGRAAEELVFREPTTGAVSDRTGTKIARAMVTEYGMSSKLGAVRYGTEHGDPFLGRTMGTQADYSHEVAQIIDDEVRKLIEAAHTEAWEILTEYRDVLDILAGELLEKETLHRAELEAIFGDVEKRPRLTMFDDFGGRVPSDKPPIKTPGELAMERGEPWPPPVPEPAFKAAIAAANRXARSATAPTARPATAPRLRQGPTQPDYGAPAGWHAPGWPPPQQSQQPGYQPQQGYWYPPPHPSGWQQPQPYPYQPYPHPGQQGTSPEHGRPSEQSGQDDGHTGDRSNPHG

SEQ ID NO: 23061 - protein, 121 aa, Mycobacterium tuberculosis
GPPGTGKTLLARAVAGEAGVPFFTISGSDFVEMFVGVGASRVRDLFEQAKQNSPCIIFVDEIDAVGRQRGAGLGGGHDEREQTLNQLLVEMDGFGDRAGVILIAATNRPDILDPALLRPGR

SEQ ID NO: 23062 - protein, 648 aa, Agrobacterium tumefaciens str. C58 (U. Washington)
MNPNFRNFALWAVIALLLIALFSMFQTSPTQTGSREIPYSQFIRDVDSGRVRDVTVTGNRVLGTYTENGTAFQTYSPVIDDSLMERLQSKNVTIVARPESDGSSGFLSYLGTLLPMFLILGVWLFFMRQMQGGSRGAMGFGKSKAKLLTEAHGRVTFDDVAGVDEAKQDLEEIVEFLRDPQKFQRLGGKIPRGVLLVGPPGTGKTLLARSVAGEANVPFFTISGSDFVEMFVGVGASRVRDMFEQAKKNAPCIIFIDEIDAVGRHRGAGLGGGNDEREQTLNQLLVEMDGFEANEGIILIAATNRPDVLDPALLRPGRFDRQVVVPNPDIVGRERILKVHVRNVPLAPNVDLKILARGTPGFSGADLMNLVNEAALMAARRNKRVVTMQEFEDAKDKIMMGAERRSSAMTEAEKKLTAYHEAGHAITALKVAVADPLHKATIIPRGRALGMVMQLPEGDRYSMSYKWMVSRLVIMMGGRVAEELTFGKENITSGASSDIEQATKLARAMVTQWGFSDALGQVAYGENQQEVFLGHSVSQSKNVSEATAQTIDTEVRRLIDEAYTEARRILTDNHDGFVAIAEGLLEYETLTGEEIKALLRGEKPARDLGDDSPGSRGSAVPKAGAKKDGPSEAKGDGEAEGGMEPQPH

SEQ ID NO: 23063 - protein, 662 aa, Agrobacterium tumefaciens str. C58 (Cereon)
MAGSRYVRVSSGSSMNPNFRNFALWAVIALLLIALFSMFQTSPTQTGSREIPYSQFIRDVDSGRVRDVTVTGNRVLGTYTENGTAFQTYSPVIDDSLMERLQSKNVTIVARPESDGSSGFLSYLGTLLPMFLILGVWLFFMRQMQGGSRGAMGFGKSKAKLLTEAHGRVTFDDVAGVDEAKQDLEEIVEFLRDPQKFQRLGGKIPRGVLLVGPPGTGKTLLARSVAGEANVPFFTISGSDFVEMFVGVGASRVRDMFEQAKKNAPCIIFIDEIDAVGRHRGAGLGGGNDEREQTLNQLLVEMDGFEANEGIILIAATNRPDVLDPALLRPGRFDRQVVVPNPDIVGRERILKVHVRNVPLAPNVDLKILARGTPGFSGADLMNLVNEAALMAARRNKRVVTMQEFEDAKDKIMMGAERRSSAMTEAEKKLTAYHEAGHAITALKVAVADPLHKATIIPRGRALGMVMQLPEGDRYSMSYKWMVSRLVIMMGGRVAEELTFGKENITSGASSDIEQATKLARAMVTQWGFSDALGQVAYGENQQEVFLGHSVSQSKNVSEATAQTIDTEVRRLIDEAYTEARRILTDNHDGFVAIAEGLLEYETLTGEEIKALLRGEKPARDLGDDSPGSRGSAVPKAGAKKDGPSEAKGDGEAEGGMEPQPH

SEQ ID NO: 23064 - protein, 625 aa, Magnetospirillum magnetotacticum
MLLVMLFNLFQASSPPRGPGQTSYSEFLSDVDRGSIADVTIQGSVVNGHFTDGRPFTTYMPQDVNVVDKLRAHNVRITAVPPSDDAPTLWSVLVSWFPMLLLIGVWVFFMRQMQGGGGKAMGFGKSRARLLTEKTGRVTFEDVAGIDEAKQELEEIVEFLKDPQKFQRLGGKIPKGCLLVGPPGTGKTLLARAIAGEANVPFFTISGSDFVEMFVGVGASRVRDMFEQGKKNAPCIIFIDEIDAVGRHRGAGLGGGNDEREQTLNQLLVEMDGFESNEGVILIAATNRPDVLDPALLRPGRFDRQVTVPNPDILGREKIIKVHMRKVPLSPDVDARIIARGTPGFSGADLANLVNEAALLAARAGKRVVTMAEFEAAKDKVMMGAERRSMVMSEDEKKLTAYHEAGHALVMMHVPGHEPLHKVTIIPRGRALGLTMSLPERDRYSLSLKQIKAMIAAFFGGRVAEEMIFGLDAVTTGASNDIQRATDLSRKLVTEFGFSEKLGPLRYNDNQEEIFLGHSVTQHKNVSEATASLIDSEVRRFVEEGENTARDILAKYRAELEIIAKGLLELETLSRDDIDALIRGETITRGDSGDYRPKDPPRRSSVPSSGPGGRPGYDPEPQPGA

SEQ ID NO: 23065 - protein, 542 aa, Magnetospirillum magnetotacticum
SSPQRRRPGRCWRNSRRGNRRSNTKSCRICRQTKGASCWRCSSGSGRGFYARGGRIGMERKTEYNIWYWVVAFIAVLFIQNLIAGWQSVAPISYSQFEKYLADGKISSVAVGADTITGTFAEPVDGKKQFVTTVVNPAILERIDRSGIEITGVPQNTFLGTLISWVAPALVFFGIWMLLFRKFADKQGFGGFMQVGRSKAKVYMEKETGVSFADVAGVDEAKAELEEVVEFLRNPAEYGKLGAHIPKGILLVGPPGTGKTLLARAVAGEAGVTFFSISGSEFVEMFVGVGAARVRDLFEQARKSAPAIIFIDELDALGRARSSGQIAGGHDEREQTLNQLLTELDGFDPSVGIVLLAATNRPEILDPALLRAGRFDRQVLVDRPDKKGRVQILGVHMKKVKLAPDVDAEKVAALTPGFSGADLANLVNEAALLATRRKADAVTMDDFNNAVERIIAGLEKKNRVLNPREREIVAHHEMGHALVAMALPGLDPVHKVSIIPRGIGALGYTIQRPTEDRFLMTREELENKIAVLLGGRAAEKIM

SEQ ID NO: 23066 - protein, 304 aa, Magnetospirillum magnetotacticum
VSPAPPSATRRSSAVLAAGDPVLSGPDLPVAPDPSGAGRAMASASSKSKLINEAHGRVSFEDVAGVEEAKEDLQEIVEFLRDPQKFQRLGGRIPRGVLLVGPPGTGKTLIARAVAGEANVPFFTISGSDFVEMFVGVGASRVRDMFEQAKKNAPCIIFIDEIDAVGRHRGAGLGGGNDEREQTLNQLLVEMDGFEANEGVIIIAATNRPDVLDPALLRPGRFDRQIMVPNPDVTGRERILRVHVRKVPLAPDVDLKTIARGTPGFSGADLMNLVNESACSPPVAASGSSRCTSSRRTERGGPRL

SEQ ID NO: 23067 - protein, 220 aa, Magnetospirillum magnetotacticum
FLSDSEKFQAVGAKIPKGVLLYGPPGTGKTLLARAVAGEAGVPFYSISGSDFVEMFVGVGASRVRDLFNQAKENSPAIIFVDEIDAVGRHRGAGMGGGHDEREQTLNQLLVEMDGFDVKTNVILIAATNRPDILDPALLRPGRFDRQIAVEAPDLKGREAILRVHAAGKPIVPEIDLAAVARRTPGFTGADLANVLNEAALLTARSGAQLIDDRRSRRDR

SEQ ID NO: 23068 - protein, 655 aa, Leptospira interrogans serovar lai str. 56601
MNKNLKNVFFVLIIMMVVLIIAYNYENNAGATKDISYSDFLNMLEPVEGKKPLGKLYKGNVDKYNKIQIEKDVIEGYYIPSEYADSKTAKPVKFRTTVAPLDKDLISSLRRANVSFDARSAEEGKFWSVIGSNILLIVILIGLFWFIMMRQIQSTGNKAFSFGKSKAKMTMDPKVKVTFEDVAGCEEAKEELVEIIEFLKDPKKFHAIGARIPTGVLLVGPPGTGKTLLARAVAGEAGVPFFSISGSDFVEMFVGVGASRVRDLFDQGKKNSPCIIFIDEIDAVGRLRGAGLGGGHDEREQTLNQMLVEMDGFEKNEGVIVMAATNRADVLDPALLRPGRFDRQVMVDLPDIKGREEILKVHSRKVPMTSDISLHSIARGTPGFTGADLANLINEGALLAARKNKKRVTQEELEEARDKVMMGPERKSFFISEKEKEVIAYHEAGHAILGTLLPYTEPVHKVTIIPRGRALGLTQSLPKEDKHILPKTYWLDQIVVAMGGFIAEEFKFGVTSTGSSNDIQQASNIARKMVCEWGMSEKLGTVNYSGDQANVFIGRDMGHSSKYYSEEFAAMIDKEVREIIQTCLNKGRDLVRKNASKFEGLAKALLAKETISHDELMTIVHPANEEGTKKKPEKTVKSKKQNGIKTNPAYNAGME

SEQ ID NO: 23069 - protein, 714 aa, Fusobacterium nucleatum subsp. nucleatum ATCC 25586
MNDNQFENEDLKNKDDSDVHEKQENKENEKEEPKQEKSQEQDSHNENKNDSEDKKSSDEDKKQDDKYNPFNNKRDDEKRRVVGKAVKVNFNFKGLLMLIFIITLAVVVPSIMDENKNQQIVDISYSDFIKNIENKKIGVVEEKDGYVYGYKASEVKYLETKSNSIKSKLGFDGKNEVQGLKARLITNRLGEDSNLMAVINNNNAIIQSVEPPEPSLFLSIVLAFLPYIIMIGFLVFMLNRMNRGGSGGGPQIFNMGKSRAKENGENISNVTFADVAGIDEAKQELKEVVDFLKEPEKFRKIGAKIPKGVLLLGEPGTGKTLLAKAVAGEAKVPFFSMSGSEFVEMFVGVGASRVRDLFNKARKNAPCIVFIDEIDAVGRKRGTGQGGGNDEREQTLNQLLVEMDGFGTDETIIVLAATNRADVLDKALRRPGRFDRQVVVDMPDVKGREEILKVHAKGKKFAPDVDFKIIAKKTAGMAGADLANILNEGAILAARAGRTEITMADLEEASEKVQMGPERKSKVVPEDEKKMVAYHEVGHGIVGYIIGGGDRVHKITMIPRGPAGGYTLSLPEEEKSFHSKKYMLDRIARYFGGRAAEEIIFGKENITDGAGSDIYYATLIAKDIVTKYGMTEKFGPVFLEATEEDYMLQRKYYSEQTGKEVDDEIRKIITEQYSRAKNILLENREKLEEVTTILLEKETIMGPEFEAIMRGENI

SEQ ID NO: 23070 - protein, 633 aa, Bacillus anthracis str. A2012
MNRIFRNTIFYLLIFLVVIGIVSYFNGSTQKTTSVSYDKFITKLEKGEVRNVQLQPKNGVFEVKGQFNNSSQGEQFVTYAPNTEELQKKINDKAQGAEVKYQPAEETSAWVTFFTSIIPFVIIFILFFFLLNQAQGGGSRVMNFGKSKAKLYNDEKKKVRFRDVAGADEEKQELVEVVEFLKDPRKFAEVGARIPKGVLLVGPPGTGKTLLARAVAGEAGVPFFSISGSDFVEMFVGVGASRVRDLFENAKKNAPCIIFIDEIDAVGRQRGAGLGGGHDEREQTLNQLLVEMDGFGANEGIIIIAATNRPDILDPALLRPGRFDRQITVDRPDVNGREAVLKVHARNKPLDENINLRAIATRTPGFSGADLENLLNEAALVAARQDKKKIDMSDIDEATDRVIAGPAKKSRVISEKERNIVAFHEAGHTVIGVVLDEADVVHKVTIVPRGQAGGYAVMLPKEDRYFMTKPELLDKITGLLGGRVAEEIVFGEVSTGAHNDFQRATGIARRMVTEFGMSDKLGPMQFGSSQGGQVFLGRDFHSEQNYSDAIAHEIDMEMQTIMKECYARAKQILTDNRDKLDLIAKTLLEVETLDAEQINHLCDYGRLPERPTSSADVKVNINMKKDDEESEDK

SEQ ID NO: 23071 - protein, 717 aa, Clostridium perfringens str. 13
MFKDKKMLKYIVIYSIIAFGILLTFNMVKDEMLYEKVDYSTFMQMLDKKEVKSVNFSGNQIEITPSDSSNLKGKILYTTNPAVAGITQPDLIKDLTAAGVGFNVTKPENYQLLGLLMSWVFPLILIFFVGRMMFSKMNNKMGGGVMSFGKNNAKLYAENETGITFKDVAGQDEAKESLVEIVDFLHDTRKYVEIGAKLPKGALLVGPPGTGKTLLAKAVAGEAKVPFFSMSGSDFVEMFVGMGAARVRDLFKQAEEKAPCIVFIDEIDAIGKSRDGAIQGNDEREQTLNQLLTEMDGFDSSKGVVILAATNRPEVLDKALLRPGRFDRRIIVDRPDLIGREEILKVHSRDVKLSDDVSLEEIAKSTPGAVGADLANIVNEAALRAVKHGRKFVIQEDLDEAVEVIIAGQEKRDRILSPKEKKIVAYHEVGHALVAALLNNTDPVHKITIVPRTMGALGYTMQLPEEEKYLVSKEEMIDQISVMLGGRAAEEVVFNSITTGASNDIERATQSARNMITIYGMSERFDMMALEAMSNRYLDGRPVRNCSETTAAIADEEVLQVIKKAHEKSIKILIENRELLDEITGVLLDKETIMGDEFMEIVYSKYPEKREADEKAKKEIQSLREQALAKRKEKEEAIKKAREEALRLEEEQRKQAELKAMIEAQEEAAKLARANNEANNDDLDSSKENEEVKSNVNDRATEEKKDDSSTNNKVDGE

SEQ ID NO: 23072 - protein, 631 aa, Thermosynechococcus elongatus BP-1
MKVSWKTVLLWSIPLLLIGILLWQGVSNFMLNQSQPPLNTASTRMSYGRFLSYLDAGRISKVDIFDNGRTAIVDVSDPELINGRPLRVRVDMPGTAPEVISKLREQHVEIDVHPARNDGALWGLLGNLLFPILLLGGLFFLFRRSSNVPGGPGQAINFGKSRARFQMEAKTGVMFDDVAGVDEAKEELQEVVTFLKKPEKFTAVGARIPKGVLLVGPPGTGKTMLAKAIAGEAGVPFFSISGSEFVEMFVGVGASRVRDLFRKAKENAPCLIFIDEIDAVGRQRGAGIGGGNDEREQTLNQLLTEMDGFEGNTGIIVIAATNRPDVLDAALLRPGRFDRQVIVDAPDIKGRLAILKVHARNKKLAPEVSLEAIARRTPGFTGADLANLLNEAAILTARRRKPAITMLEIDDAVDRVVAGMEGTPLIDGKSKRLIAYHEVGHAIVGTLLKDHDPVQKVTLVPRGQARGLTWFMPSEDSGLISRSQLMARMAGALGGRAAEYVVFGDAEVTTGAGNDLQQVTAMARQMVTRFGMSDLGPLSLETQNGEVFLGRDLVSRTEYSEEIAARIDAQVRELVQHSYELAIKIIRENRVVIDRLVDLLVEKETIDGEEFRQIVAEYTVVPDKERFVPQL

SEQ ID NO: 23073 - protein, 734 aa, Oenococcus oeni MCW
MKNKNRGFFRSSLSYAFVILAVIFLIYSFFGRSDGSVKYLSTTTFLKELKNNKIKDFTIQPGDSGVYTIAGDFKKAQKSSSSSSSTTTLLSGYQSSVTKFTAYVLPNNSSLKQITTAAQKAGVAVNPKPAASNFWGSMLTMILPTLIMFALLYWMLIGSQRGQGGSGGPGGIMSFGRSKAKPADPKQNKIRFADVAGEEEEKQELVEVVEFLKDPKKFTKLGARIPKGVLLEGPPGTGKTLLAKAVAGEAKTPFFSISGSDFVEMFVGVGASRVRDLFENAKKSAPSIIFIDEIDAVGRRRGAGMGGGNDEREQTLNQILIEMDGFEGSEGVIVLASTNRSDVLDPALLRSGRFDRKILVGAPDVKGREAILRVHAKNKPLAADVDLKVIAQQTPGFVGADLENLLNEAALLAARNDEKAVTAADIDEAEDRVIAGPAKKDRKTTQDERETVAYHEAGHAIVGLVLNDAQVVRKVTIVPRGRAGGYALMMPKDERYLMSEKDAKEELAGLMGGRAAEILINHVASSGASNDFQQATQIAREMVTQYGMSDKLGMVQLEGSSNVFVGDPNNPNPPYSQKTSELIDEEVRRLTNEAYKRAVDIIKSHPKQHKAIAEALLKYETLDEAQIRSLFETGEIPSDLVKDSQRPARPLSYEESKAALKKNGSVDNKEAEDEVKEDKDDKEDENDSKSGSDSTSKKKTTKKTSTTRRKSTTSSTKKKPTTKRTKKDDDNKEN

SEQ ID NO: 23074 - protein, 575 aa, Trichodesmium erythraeum IMS101
  unsure (1)..(575): unsure at all Xaa locations
MKISWRTIVLWTIPALVIGFFLWQGTFGQTQVNMGSNTASTRMSYGRFLDYLQADRVTSVDLYDNGRTAIVEAVDPELDNRVQRLRVDLPVNSPSLISRLREANINFDSHPPRNEGAVWGLLGNLIFPILLIVGLFFLFRRSSNVPGGPGQAMNFGKSKARFSMEAKTGVLFDDVAGVDEAKEELQEVVTFLKKPERFTAVGARIPKGVLLVGPPGTGKTLLAKAIAGEAGVPFFSISGSEFVEMFVGVGASRVRDLFKKAKENAPCIIFIDEIDAVGRQRGAGIGGGNDEREQTLNQLLTEMDGFEGNSGIIIIAATNRPDVLDSALLRPXXXXXXXXXXXXXXXXXSILDVHARDKKLSSEISLEAIARRTPGFTGADLANLLNEAAILTARRRKEAITMLEINDAVDRVVAGMEGTPLMDGKSKRLIAYHEVGHAIVGTLLKEHDPVQKVTLVPRGQARGLTWFMPNEDQGLISRSQILARITGALGGRAAEKVIFGDAEVTTGASNDLQQVTGMARQMVTRYGMSDLGLMSLETQQSEVFLGRDLMTRSEYSXXXXXXXXXXXXXXXXXPW

SEQ ID NO: 23075 - protein, 666 aa, Tropheryma whipplei str. Twist
MSKITKSPVLYIVLLVVGVWVAVNLFLTNAYQSIRTEEGLELIKSDSLVSVRIVDRDQRVDLELATPYKNHGTKVQFNYVSQRATEIVNAVNKAKIKDGFTDEVPAPSVWGSIISMLLPIAAIGLFLWFMAGPQAAGGRGIAQFSRMRSRLVSKEMPKVRFTDVAGADEAVEELQEIKDFLSDPDKYRKLGARIPKGVLLFGPPGTGKTLLARAVAGEAGVPFFSISGSDFVEMFVGVGASRVRDLFEQAKQNSPSIIFIDEIDAVGRRRGSGFGGGHDEREQTLNQLLVEMDGFDVKTNIILIAATNRSDVLDSALLRPGRFDRHVAIDAPNLQGRLKILQVHARTKPVSKSVDLEVLARKTPGFTGADLANVLNEAALLTARSNAQIIDDRALDEAVDRVMAGPQRRSRVMTDHEKLVTAYHEAGHALTAAAMRYSDPVTKVTILPRSRALGYTMVMPVQDRYSVTRNELLDKLAYAMGGRAAEELVFHDPTTGASNDIEKATSIARKMVTEFGLSKDLGAVKFGNAHNETLMGVGQMTARDYSEVTAERIDVQVRALIQNAHDEAWEVISNNRNLLDDLALNLLEKETLNQDEIAEIFKGVRKLPERHVWQSAPNREPSNKPPVKYSAMGPDSEVTAKSPKRTSNRRRLPSARRPRKDSETQE

SEQ ID NO: 23076 - protein, 644 aa, Brucella suis 1330
MNPNYRNFALWAIIALLLIALFNLFQSPGQRTNSREISYSQFIDDVSNGRVKSVTITGQRISGTLADNGSTFQTYSPGDTGLVSRLEDKGVAITARPESDGSSSLIGILLSWLPMILILGVWIFFMRQMQGGSRGAMGFGKSKAKLLTEAHGRVTFQDVAGVDEAKQDLEEIVEFLRDPQKFQRLGGKIPRGVLLVGPPGTGKTLLARSVAGEANVPFFTISGSDFVEMFVGVGASRVRDMFEQAKKNAPCIIFIDEIDAVGRHRGAGLGGGNDEREQTLNQLLVEMDGFEANESIILIAATNRPDVLDPALLRPGRFDRQVVVPNPDIVGREQILKVHVRNVPLAPNVDLKVVARGTPGFSGADLANLVNEAALMTARRNKRLVTMQEFEDSKDKIMMGAERRSAMTPEEKTNTAYHEAGHAIVALNVPKADPVHKATIIPRGRALGMVMQLPEGDRYSATYTWMVSRLAIMMGGRVAEELKFGKENITSGASSDIQQATKLARSMVTQWGYSDKLGRVAYGDNQEEVFLGHSVSRTQNISEETAQIIDAEVRRLIDEAYAEATRILTKKKKDWIALAEGLLEYETLTGDEINELIAGNKPSRDQGNDTPSRGSGVPKAGSSRKRKGSEPGGEPGMEPKPQPQ

SEQ ID NO: 23077 - protein, 418 aa, Mycoplasma hominis
SRGAGIGGGNDEREQTLNQLLVEMDGIKENSGILIMAATNRTDVLDPALLRPGRFDRTITVGLPDIKEREAILKLHANGKRIASNINFAMVARRTPGFSGAQLENVINEASLLSVRENTGVITIEQIDEAIDRVIAGPAKKSRTISEKENIAVAYHEAGHAVVGIKIKGGNKVQKITIIPRGKAGGYNLMMPDEEKYNRSKSELLAIITSFMGGRVAEAIIYGADNVSTGASDDIAKATNIARKMVTEWGLSDLGPIKYEEDSSNPFLGRDYMKNSSFSSKVGQEIDEQIRKIILTAEKKAHEIITENRQLLELIKDALIIKETIVAEEIEYIEKHMELPPEITNTKKELKNEYSEEDFNELFNEVAGQKQIQEDKYKATLNSELKKHNIEDNSSNNHSEDSNDTKNLDEDSNKKDNQ

SEQ ID NO: 23078 - protein, 673 aa, Fusobacterium nucleatum subsp. vincentii ATCC 49256
MNDNQFENEDLKDKDDSDGHEKEENKKEEPKQENQQEQDSQDKDKKSSDEDKKQDDKYNPFNNKNKRDEERRRVVGKAIKVNFNFKGLLMLIFIITLAVVVPNIMDENKNQQVVDVSYSDFIKNIENKKIGVVEEKDGYVYGYKASEVKYLETKSNSIKSKLGFDGKKEVQGLKARLITNRLGEDANLMAVINNNAAIIQSVDPPEPSLFLSIVLAFLPYIIMIGFLVFMLNRMNRGGSGGGPQIFNMGKSRAKENGENISNVTFADVAGIDEAKQELKEVVDFLKEPEKFRKIGAKIPKGVLLLGQPGTGKTLLAKAVAGEAKVPFFSMSGSEFVEMFVGVGASRVRDLFNKARKNAPCIVFIDEIDAVGRKRGTGQGGGNDEREQTLNQLLVEMDGFGTDETIIVLAATNRADVLDKALRRPGRFDRQVVVDMPDIKGREEILKVHAKGKKFAPDVDFKIIAKKTAGMAGADLANILNEGAILAARAGRTEITMADLEEASEKVQMGPEKKSKVVPEDEKKMVAYHEVGHGIVGYIIGGGDRVHKITMIPRGQAGGYTLSLPEEEKSFHSKKYMLDRIARYFGGRAAEEIIFGKENITDGAGSDIYYATLIAKDIVTKYGMTEKFGPVFLEATEEDYMLQRKYYSEQTGKEVDDEIRKISLNNIQELKISY

SEQ ID NO: 23079 - protein, 603 aa, Clostridium tetani E88
MNNKKFSSATAWVIIFVFVIFASLYLARNNETATTITFNKFQKHWINNEIKSFEVKEDKMTVSGNLKDGSQYETIVPFERLNQFISAHDKNGEVIEKYALPAKTPMWLNWIPTALVILMFVIFWFMFMQQSQGGGGNRNVMNFGKSRAKMATPDKQKVTFNDVAGAEEEKEELAEIVDFLKQPKRYIEMGARIPKGVLLVGPPGTGKTLLAKAIAGEAGVPFFSISGSDFVEMFVGVGASRVRDLFDQAKKNSRCIIFIDEIDAVGRQRGAGLGGGHDEREQTLNQLLVEMDGFGVNEGIIMVAATNRPDILDPALLRPGRFDRQILVGAPDVRGREEILKVHSRNKPLSEEVKLDVLAKRTPGFTGADLENLMNESALLAVRKDKKQIDMEELEEAVTRVIAGPEKKSRVIDEEDRRLTAYHEAGHAVVMKLLPHADPVHQISIVPRGMAGGYTMHLPEKDRAYMSKSKLEEEIVGLLGGRVAEKLIIGDISTGAQNDIERATTIAKKMIMDYGMSEVLGPIAFGSGHDEVFLGRDFGKSKDFSEEVASKIDKEVKGIIDTAYDRAQNLLMENINKLHAVAKELLEKEKLEAEEFEEIFESN

SEQ ID NO: 23080 - protein, 624 aa, Clostridium tetani E88
MFDKNKKDPNYDNKKFKYIIYYVIAVTIVVYLINDYVVKTQTKNIKYTNFLNMITEQQIKEVKFAKDKIIIYPKEGIGFNEKILYTGKFNNDEQLLEKLNKANITYDFIIPEQDSPLKSFIFNWLMPFAILMALERIFFSRLNKKMGSGVMSFGKNTAKIYAENETGVTFKDVAGQEEAKESLMEIVDFLHNSDKYTGIGAKLPKGALLVGPPGTGKTLLAKAVAGEAKVPFFSISGSGFVEMFVGMGAARVRDLFEQAQEKAPCIIFIDEIDAIGKSRDGHVSGNDEREQTLNQLLAEMDGFDSSKGVVILAATNRPEVLDKALLRPGRFDRRVIVDRPDLKGREEILKVHAKGVKMDEKVDLTSIAKATPGAVGADLANIINEAALRAVKINRDKVFQGDLEEAVEIIIAGKEKKDRIMSPEEKKIVAFHEVGHALVAALLPNTDPVHKITIVPRTMGALGYTMQLPDTEKYLISKEEMLDKICVMLGGRAAEEVQFNRISTGASNDIEKATETARNMVTVYGMSERFDMMGLESISNRYLDGRPVRNCSNETSAIIDDEVLKIIKNSHEKSINLLEENKELLNRIAETLLEKETITGEEFMKIVEGKDIEIEDLETVIQEP

SEQ ID NO: 23081 - protein, 576 aa, Clostridium tetani E88
MFKNKKIILPIIIASLSLIFLLFFNYKTRSVTNKNYVEFLNALSSKKVVSVYLTDTPKIKIKLSDGNLYQMDNPRTDNFKETLLRQGVHVSENSPLNYLTLTFSASFILSVAFLVGILMKSSNITSKKAFSLDALDVSSTEETAFTFKNIAGNEEAKESVQDVIDFLKNPKKYESYGARMPKGIILYGEPGTGKTLLAKAIAGEAGVPFYALSGSDFVQVYVGVGASRIRQLFKKARNHKKVVIFIDEIDAIGKKRSNSKNGNSDERDQTLNALLTEMSGFNESEGIVVIAATNRLDMLDDALLRPGRFDRHIEVNLPDISAREKILSLYCENKPIKNFNIKDFAQKTAYFSGAKLENLVNEAAILACKEESEYIENIHFEKAFSIILAGYEKQNRDFIHNTDKKITAFHEAGHALVSMLMLPEEKVSKVTIIPSNKGAGGYTLSIPEDKLYKNKNYLNKKIMVLLAGRAAEELTFGADFITTGAHNDLKQCTNIAFHMITQYGMGNSLGLLNLEELMSLNIDKNNIILECKNLVDNLYIQTKQLLSDNTSILKSISEQLLEKETLYSDDLISLCN

SEQ ID NO: 23082 - protein, 666 aa, Tropheryma whipplei TW08/27
MSKITKSPVLYIVLLVVGVWVAVNLFLTNAYQSIRTEEGLELIKSDSLVSVRIVDRDQRVDLELATPYKNHGTKVQFNYVSQRATEIVNAVNKAKIKDGFTDEVPAPSVWGSIISMLLPIAAIGLFLWFMAGPQAAGGRGIAQFSRMRSRLVSKEMPKVRFTDVAGADEAVEELQEIKDFLSDPDKYRKLGARIPKGVLLFGPPGTGKTLLARAVAGEAGVPFFSISGSDFVEMFVGVGASRVRDLFEQAKQNSPSIIFIDEIDAVGRRRGSGFGGGHDEREQTLNQLLVEMDGFDVKTNIILIAATNRSDVLDSALLRPGRFDRHVAIDAPNLQGRLKILQVHARTKPVSKSVDLEVLARKTPGFTGADLANVLNEAALLTARSNAQIIDDRALDEAVDRVMAGPQRRSRVMTDHEKLVTAYHEAGHALTAAAMRYSDPVTKVTILPRSRALGYTMVMPVQDRYSVTRNELLDKLAYAMGGRAAEELVFHDPTTGASNDIEKATSIARKMVTEFGLSKDLGAVKFGNAHNETLMGVGQMTARDYSEVTAERIDVQVRALIQNARDEAWEVISNNRNLLDDLALNLLEKETLNQDEIAEIFKGVRKLPERHVWQSAPNREPSNKPPVKYSAMGPDSEVTAKSPKRTSNRRRLPSARRPRKDSETQE

SEQ ID NO: 23083 - protein, 675 aa, Oceanobacillus iheyensis HTE831
MSQVFRNALFWLLIFFVIIGVIGVINNQGEEREQYDVEQFISALNNGEIEELVFQPSHGIIRLTGTLTDGETEFVAQVPDNNDLVSQITDTAREQSQLTVMEEEQPSPWLTFLTGIIPFLLIGLFFLFILSQAQGGGGGGRVMNFGKSKAKMYSEDKKKVRFKDVAGADEEKQELVEVVEFLKDPRKFSQVGARIPKGVLLVGPPGTGKTLLARAVAGEAGTPFFSISGSDFVEMFVGVGASRVRDLFENAKKNAPCIIFIDEIDAVGRQRGAGLGGGHDEREQTLNQLLVEMDGFGANEGIIIIAATNRADILDPALLRPGRFDRQIMVDRPDVKGREAVLGVHAQNKPLDANVDLKTIAMRTPGFSGADLENLLNEAALIAARDDRKKLNQLDIDEAIDRVIAGPAKKSRVISQKERNIVAYHESGHTVIGMVLDDADVVHKVTIVPRGQAGGYAVMLPREDRYFMTKPELFDKITGLLGGRVAEEIIFGEVSTGASNDFQRATNIAHKMITEYGMSDKIGPLQFSSGGGGNVFLGRDIQNEQTYSDAIAHEIDKEMQSFINYCYDRAKTILTENKDQLELIAKTLLEVETLDAKQIKSLFEEGILPEPEEETDELKVNINSKEDEDKKGISYEEAKQKLDDEEKSEREEIDSENTSSDETQDDTSEDQNPKN

SEQ ID NO: 23084 - protein, 637 aa, Bacillus subtilis subsp. subtilis str. 168
MNRVFRNTIFYLLILLVVIGVVSYFQTSNPKTENMSYSTFIKNLDDGKVDSVSVQPVRGVYEVKGQLKNYDKDQYFLTHVPEGKGADQIFNALKKTDVKVEPAQETSGWVTFLTTIIPFVIIFILFFFLLNQAQGGGSRVMNFGKSKAKLYTEEKKRVKFKDVAGADEEKQELVEVVEFLKDPRKFAELGARIPKGVLLVGPPGTGKTLLAKACAGEAGVPFFSISGSDFVEMFVGVGASRVRDLFENAKKNAPCLIFIDEIDAVGRQRGAGLGGGHDEREQTLNQLLVEMDGFSANEGIIIIAATNRADILDPALLRPGRFDRQITVDRPDVIGREAVLKVHARNKPLDETVNLKSIAMRTPGFSGADLENLLNEAALVAARQNKKKIDARDIDEATDRVIAGPAKKSRVISKKERNIVAYHEGGHTVIGLVLDEADMVHKVTIVPRGQAGGYAVMLPREDRYFQTKPELLDKIVGLLGGRVAEEIIFGEVSTGAHNDFQRATNIARRMVTEFGMSEKLGPLQFGQSQGGQVFLGRDFNNEQNYSDQIAYEIDQEIQRIIKECYERAKQILTENRDKLELIAQTLLKVETLDAEQIKHLIDHGTLPERNFSDDEKNDDVKVNILTKTEEKKDDTKE

SEQ ID NO: 23085 - protein, 634 aa, Aquifex aeolicus VF5
MNALKNFFIWAIIIGAAIVAFNLFEGKREFTTKVSLNEVVKLVEEGKVSYAEVRGNTAIIQTKDGQKLEVTLPPNTNLVDKMVEKGVRVEVANPEPPGGWLVNVFLSWLPILFFIGIWIFLLRQMSGGGNVNRAFNFGKSRAKVYIEEKPKVTFKDVAGIEEVKEEVKEIIEYLKDPVKFQKLGGRPPKGVLLYGEPGVGKTLLAKAIAGEAHVPFISVSGSDFVEMFVGVGAARVRDLFETAKKHAPCIIFIDEIDAVGRARGAIPVGGGHDEREQTLNQLLVEMDGFDTSDGIIVIAATNRPDILDPALLRPGRFDRQIFIPKPDVRGRYEILKVHARNKKLAKDVDLEFVARATPGFTGADLENLLNEAALLAARKGKEEITMEEIEEALDRITMGLERKGMTISPKEKEKIAIHEAGHALMGLVSDDDDKVHKISIIPRGMALGVTQQLPIEDKHIYDKKDLYNKILVLLGGRAAEEVFFGKDGITTGAENDLQRATDLAYRMVSMWGMSDKVGPIAIRRVANPFLGGMTTAVDTSPDLLREIDEEVKRIITEQYEKAKAIVEEYKEPLKAVVKKLLEKETITCEEFVEVFKLYGIELKDKCKKEELFDKDRKSEENKELKSEEVKEEVV

SEQ ID NO: 23086 - protein, 651 aa, Brucella melitensis 16M
MVSIGPDMNPNYRNFALWAIIALLLIALFNLFQSPGQRTNSREISYSQFIDDVSNGRVKSVTITGQRISGTLADNGSTFQTYSPGDTGLVSRLEDKGVAITARPESDGSSSLIGILLSWLPMILILGVWIFFMRQMQGGPRGAMGFGKSKAKLLTEAHGRVTFQDVAGVDEAKQDLEEIVEFLRDPQKFQRLGGKIPRGVLLVGPPGTGKTLLARSVAGEANVPFFTISGSDFVEMFVGVGASRVRDMFEQAKKNAPCIIFIDEIDAVGRHRGAGLGGGNDEREQTLNQLLVEMDGFEANESIILIAATNRPDVLDPALLRPGRFDRQVVVPNPDIVGREQILKVHVRNVPLAPNVDLKVVARGTPGFSGADLANLVNEAALMAARRNKRLVTMQEFEDSKDKIMMGAERRSAMTPEEKTNTAYHEAGHAIVALNVPKADPVHKATIIPRGRALGMVMQLPEGDRYSATYTWMVSRLAIMMGGRVAEELKFGKENITSGASSDIQQATKLARSMVTQWGYSDKLGRVAYGDNQEEVFLGHSVSRTQNISEETAQIIDAEVRRLIDEAYAEATRILTKKKKDWIALAEGLLEYETLTGDEINELIAGNKPSRDQGNDTPSRGSGVPKAGSSRKRKGSEPGGEPGMEPKPQPQ

SEQ ID NO: 23087 - protein, 718 aa, Enterococcus faecalis V583
MNKKNNGMKNGLYYVLVVLAMVMVVYFIFGNNNQQSPDIDYSTFQQQLEDGKVKDMTIQPTNGVYRIEGQYKEKQEVKDTGGLSLWGSTQASSKGFTTTVLPSDTTLAGIQDAAQNNKVKLVVKEQSTSGAWLSLLFSFLPLVIIFFFFYMMMSQQGGGGGGGGRVMNFGKSKAKEADKKANRVRFSDVAGAEEEKQELVEVVEFLKDPRRFAELGARIPAGVLLEGPPGTGKTLLAKAVAGEAGVPFYSISGSDFVEMFVGVGASRVRDLFETAKKNAPAIIFIDEIDAVGRQRGAGMGGGHDEREQTLNQLLVEMDGFDGNEGVIVIAATNRSDVLDPALLRPGRFDRQILVGRPDVKGREAILRVHAKNKPLADDVDLKVVAQQTPGFAGADLENVLNEAALVAARRNKKKIDASDVDEAEDRVIAGPAKKDRVINKKEREMVAYHEAGHTIVGLVLSRARVVHKVTIIPRGRAGGYMIALPKEDQFLMTKEDMFEQIVGLLGGRTAEEIIFGVQSTGASNDFEQATGIARSMVTEYGMSDKLGPVQYEGNHQVFVGRDYGQTKAYSEQVAFEIDQEVRRILMDAHTKAHEIIEAHREQHKLIAEKLLEYETLDAKAIKSLFETGKMPEGADSDYPSEKEAQTFEEAKRALEEKEAQKQVEEKQDFEEAKKELHDEAEEVKVESEQTEKEVQSEEKKDSDSNSEYDRNNYEDRYK

SEQ ID NO: 23088 - protein, 633 aa, Bacillus cereus ATCC 14579
MNRIFRNTIFYLLIFLVVIGIVSYFNGSTQKTTSVSYDKFITKLESGEVRNVQLQPKNGVFEVKGQFNNSSQGEQFVTYAPNTEELQKKINDKAKGAEVKYQPAEETSAWVTFFTSIIPFVIIFILFFFLLNQAQGGGSRVMNFGKSKAKLYNDEKKKVRFRDVAGADEEKQELVEVVEFLKDPRKFSEVGARIPKGVLLVGPPGTGKTLLARAVAGEAGVPFFSISGSDFVEMFVGVGASRVRDLFENAKKNAPCIIFIDEIDAVGRQRGAGLGGGHDEREQTLNQLLVEMDGFGANEGIIIVAATNRPDILDPALLRPGRFDRQITVDRPDVNGREAVLKVHARNKPLDEHINLRAIATRTPGFSGADLENLLNEAALVAARQDKKKIDMSDIDEATDRVIAGPAKKSRVISEKERNIVAFHEAGHTVIGVVLDEADVVHKVTIVPRGQAGGYAVMLPKEDRYFMTKPELLDKITGLLGGRVAEEIVFGEVSTGAHNDFQRATGIARRMVTEFGMSDKLGPMQFGSSQGGQVFLGRDFHSEQNYSDAIAHEIDMEMQSIMKECYARAKQILTENRDKLDIIAQTLLEVETLDAEQINHLCDYGRLPERPTSSDDVKVNINMKKDDEDKEDK

SEQ ID NO: 23089 - protein, 913 aa, Chlamydophila caviae GPIC
MSKDKKMKPESKKSFPTLFFFLLFGVIFAVIAVQNFLVTKKARVSFSHQLEHLVNLKLIYPEDSRKIALNDNLVSFSGRFRDSSTDESQLRYHYLELIDQRHQLEFDLQEINKSLDNLSKEVESSVLWFSAISGWSIPETGYLISPSVELGKSSLGALVIQAPNNFQIINLRSLEQRYQTLPRSSEGLRTFGSDLYELIGKYLSPALGIGSESVKRELKDLYQQVEVSLTQSMDAEHLSALYQRVLDSLQRISSSLALSDNGERFGQLRSVRLYREERSKYEKLIEDSQINQVQLDKLRSDLSQVVWYFNNQELSSRALEKQDPEVFAHWFSGAKQEWEDFSHNRSLTFKAPDQPRNLVLEKTFKSEEPAPHYIGYLFTFLPIILVLVFVYFVFAKQVRGMNGSAMSFGKSPARLLTNGQNKVTFADVAGIEEAKEELIEIVDFLKNPTKFTSLGGRIPKGVLLIGPPGTGKTLIAKAVSGEADRPFFSIAGSDFVEMFVGVGASRIRDMFEQAKRNAPCIIFIDEIDAVGRHRGAGIGGGHDEREQTLNQLLVEMDGFGTNEGVILMAATNRPDVLDKALLRPGRFDRRVVMNLPDIKGRFEILSVHAKRIKLDPTVDLMAVARSTPGASGADLENLLNEAALLAARKDRTAVTAVEVAEARDKVLYGKERRSLEMDAEERKTTAYHESGHAVVGLCVQHADPVDKVTIIPRGLSLGATHFLPEKNKLSYWKKELFDQLAVLMGGRAAEDIFLGDISSGAQQDISQATKLVRSMVCEWGMSEQLGTVTYDERSDSSTGYGSYHEKSYSEETAKAIDGELRALLDAAYQRALTIIREHRDEVELMTQMLIEFETLDAKDVKEIMDHTWDPERKRARLKEEGILFKKVSDDLPPPPPQENAMKDGTLKLNNTTT

SEQ ID NO: 23090 - protein, 610 aa, Thermotoga maritima
MNRSNIWNLLFTILIIVTLFWLARFFYVENSPVSKLSYTSFVQMVEDERSVVSEVVIRDDGVLRVYTKDGRVYEVDAPWAVNDSQLIEKLVSKGIKVSGERSGSSSFWINVLGTLIPTILFIVVWLFIMRSLSGRNNQAFTFTKSRATMYKPSGNKRVTFKDVGGAEEAIEELKEVVEFLKDPSKFNRIGARMPKGILLVGPPGTGKTLLARAVAGEANVPFFHISGSDFVELFVGVGAARVRDLFAQAKAHAPCIVFIDEIDAVGRHRGAGLGGGHDEREQTLNQLLVEMDGFDSKEGIIVMAATNRPDILDPALLRPGRFDKKIVVDPPDMLGRKKILEIHTRNKPLAEDVNLEIIAKRTPGFVGADLENLVNEAALLAAREGRDKITMKDFEEAIDRVIAGPARKSKLISPKEKRIIAYHEAGHAVVSTVVPNGEPVHRISIIPRGYKALGYTLHLPEEDKYLVSRNELLDKLTALLGGRAAEEVVFGDVTSGAANDIERATEIARNMVCQLGMSEELGPLAWGKEEQEVFLGKEITRLRNYSEEVASKIDEEVKKIVTNCYERAKEIIRKYRKQLDNIVEILLEKETIEGDELRRILSEEFEKVVE

SEQ ID NO: 23091 - protein, 624 aa, Thermus thermophilus
MPRAPFSLLALVLGLAFLAWPSASRGTVGAPSGTVNYTTFLEDLKAGRVKEVVVRAGDTRIQGVLEDGSAFTTYAASPPDNATLEGWMARGVSVRVEPPQGQNALGFLWPLLLVGLLIGALYYFSRNGRAGPSDSAFSFTKSRARVLTEAPKVTFKDVAGAEEAKEELKEIVEFLKNPSRFHEMGARIPKGVLLVGPPGVGKTHLARAVAGEARVPFITASGSDFVEMFVGVGAARVRDLFETAKRHAPCIVFIDEIDAVGRKRGSGVGGGNDEREQTLNQLLVEMDGFEKDTAIVVMAATNRPDILDPALLRPGRFDRQIAIDAPDVKGREQILRIHARGKPLAEDVDLALLAKRTPGFVGADLENLLNEAALLAAREGRRKITMKDLEEAADRVMMGPAKKSLVLSPRDRRITAYHEAGHALAAHFLEHADGVHKVTIVPRGRALGFMMPRREDMLHWSRKRLLDQIAVALAGRAAEEIVFDDVTTGAENDFRQATELARRMITEWGMHPEFGPVAYAVREDTYLGGYDVRQYSEETAKRIDEAVRRLIEEQYQRVKALLLEKREVLERVAETLLERETLTAEEFQRVVEGLPLEAPEEAREEREPPRVVPKVKPGGALGGA

SEQ ID NO: 23092 - protein, 278 aa, Thermus thermophilus
GPLGSHMGARNGRAGPSDSAFSFTKSRARVLTEAPKVTFKDVAGAEEAKEELKEIVEFLKNPSRFHEMGARIPKGVLLVGPPGVGKTHLARAVAGEARVPFITASGSDFVEMFVGVGAARVRDLFETAKRHAPCIVFIDEIDAVGRKRGSGVGGGNDEREQTLNQLLVEMDGFEKDTAIVVMAATNRPDILDPALLRPGRFDRQIAIDAPDVKGREQILRIHARGKPLAEDVDLALLAKRTPGFVGADLENLLNEAALLAAREGRRKITMKDLEEAAS

SEQ ID NO: 23093 - protein, 254 aa, Thermus thermophilus
GPLGSVLTEAPKVTFKDVAGAEEAKEELKEIVEFLKNPSRFHEMGARIPKGVLLVGPPGVGKTHLARAVAGEARVPFITASGSDFVEMFVGVGAARVRDLFETAKRHAPCIVFIDEIDAVGRKRGSGVGGGNDEREQTLNQLLVEMDGFEKDTAIVVMAATNRPDILDPALLRPGRFDRQIAIDAPDVKGREQILRIHARGKPLAEDVDLALLAKRTPGFVGADLENLLNEAALLAAREGRRKITMKDLEEAAS

SEQ ID NO: 23094 - protein, 614 aa, Cyanidium caldarium
MKKQWKKIVLFVLPVIITLITLSSFLFYNQDVVHNWSSSRMTYGRFLEYIDMNWVKKVDLYDNARTAIVDIINPDIKGEEQLVRVELPTFSSELVSKLKNKLIDFDAHPSSSNVNLVSWLSNLLLPLILIITLFFFFRRGNKSSSGPGQAFNFGKAKARFHMEAKTGIVFEDVAGIEEAKEELQEIVAFLKDSRKFTNVGATIPKGVLLVGPPGTGKTLLAKAIAGEASAPFFSISGSEFVEMFVGVGASRVRDLFKKAKEKAPCIVFIDEIDAVGRQRGVGIGGGNDEREQTLNQLLTEMDGFSGDTGVIVVAATNRIDVLDSALLRPGRFDRQIMVSLPNINGRLAILKVHSKKKKIHKDVLLEVIARRTPGFSGADLANLLNEAAILTVRRGKVEITMKEIEDSIDKIIAGLEGSPLADSRIKRLIAYHEAGHAVAATFLPHHDPVQKVTLIPRRQAKGLTWFLPNDDQFLVSKSQILSKIIAALAGRAMEEIVFGLPEVTIGAANDIKQVTFMARQMVTKFGMSKVGPICLENSSSEVFIGRDLMGRHELSEEMVAKVDLEVRSILKDCYIQARTILSQNRKLIDRVVNELVEKETIEAKEFMRIVEERV

SEQ ID NO: 23095 - protein, 601 aa, Heliobacillus mobilis
MSRIVKNLAIYILIVLLAISVLRVTKTPEPAQEPISYTQFYQLLVTDQIKELNAISERDRTEITGVKKDGNRFTTIGPVDIKRITDIVLDKQIPFTQKPAPEPPWWTGLFSTLLPILVLVGLFFFMMQQTQGGGSRVMQFGKSRAKLHTDDKKKVTFEDVAGADEVKEELQEVVDFLKHPKKFVELGAKIPKGVLLFGPPGTGKTLLARAVAGEAGVPFFSISGSDFVEMFVGVGASRVRDLFEQAKKNSPCIVFIDEIDAVGRQRGAGLGGGHDEREQTLNQLLVEMDGFSANEGIIIIAATNRPDILDPALLRPGRFDRQIVVDRPDIRGRKEILGVHVKGKPLDETIDLDVLARRTPGFTGADLANMVNEAALLAARRGTKKVGMHEMEDAIERVIAGPEKKARVISEFEKKLVSYHEAGHALVGGLLEHTDPVHKISIIPRGWAGGYTLLLPEEDRHYMTKSHLLDQVTMLLGGRVAEAIVLKEISTGASNDLERATDLVRKMITEYGMSEELGPLTFGHKQEQVFLGRDLARDRNYSEAVAFSIDKEARRIIEECYGKAKKILESNADKLHLIAQTLMDKETIEASEFTELMKKVS

SEQ ID NO: 23096 - protein, 822 aa, Mycoplasma penetrans
MEFNKLELLIIRALKLNTNSNKKNSFYNKFLNLRNKVLNIQKNSLDQPSDAPSNNKKRNLDQPDNPNQKEPGKARKIIWSFIIIILVLGVLALIILSGFSFSATSLNAASFTENGTSSFKITTNTNQTRTIGGAPSTIYQRDSTLYVIYIENSFSGYYYSAIITDISVSNNTASVGNGSNTTGGSTSNLQKGLQIANLLVDGSGNVYKNKDNNGSTTSGTTTFSLNSNLTSAMKLQGWSSNQSMSLPTSYSFYTAASLVLSILPFILLIGIIYYSMRKMGQAGGGQDNVFSIGKSQAKLAKSTVLFSDVAGIEEEKEELIEIVDYLKRPDRYAAMGARVPKGVILYGPPGTGKTLLAKAVAGEAKVPFFQVSGSAFEDMLVGVGAKRVRDLFNKAVKSAPAIIFIDEIDSVGSKRGKFETTAGSLADQTLNQLLAEMDGFNTKTGVIVMAATNRLDVLDDALLRPGRFDRHIQVNLPDIKERVAILKIHSRNKNISETVDLEDIARRTPGFSGAQLENVLNEATLLAVRRNKKSIYTEELDEAIDRVIAGPAKKTRVISLEEKRQIAFHEAGHAIVGMYTKGSEVVEKITIIPRGQAAGYTLSVPEIQELSIQKKSDLLGMVAGLLGGRASEEINFGKEFISTGAANDLYKATNIVRAMVTQFGMSPNVGLAQYYPSEGTVNPYQSKNFSESTSQLIDKEIERIFKERYEYAYKIIKEHNKEVELIVESLLLLETIVKPQIDFIHKYKQLPKEALEKKKELEEKKKAEDLIRKAKKESEASSKEEKEMDVEKKVQKPSASSTEPTSKPKKAPSKESSSDKKK

SEQ ID NO: 23097 - protein, 560 aa, Geobacter metallireducens
MNAVTIQGNEIIGKFADGKEFRSYKPLDATLSDKLLEKKISISAKPEEEKVSWFSIFISWFPLLFLVGVWIFFMRQMQGGGGKAMAFGKSRAKLLTEAQGRITFEDVAGVDEAKEELEEIIQFLKDPKKFTKLGGRIPKGVLLVGPPGTGKTLLARAVAGEAGVPFFSISGSDFVEMFVGVGASRVRDLFVQGKKNAPCIIFIDEIDAVGRHRGAGLGGGHDEREQTLNQLLVEMDGFESNEGVILIAATNRPDVLDPALLRPGRFDRQVVVPQPDVKGREMILKVHTKKTPLGPNVNLDVIARGTPGFSGADLANVVNEAALLAARKDKSVVDMQDFDDAKDKVLMGVERRSMVISEDEKKNTAYHEAGHTLVAKLIPGSDPVHKVSIIPRGRALGITMQLPSEDKHSYSKEALLNRIAVLMGGRAAEDIIFGSLTTGAGNDIERATDLARKMVCEWGMSDKMGPVSFGKKEESIFLGRDMSMHKNYSEATAVEIDGEIRKIVEDSYSRVTTLLRDNIDILHKLSLELIEKENLTGDEVEQIVRSVRGTVPASEEIPAS

SEQ ID NO: 23098 - protein, 619 aa, Geobacter metallireducens
MGQSVWKPLILVFVLIIVFNFVYGYFARQTAEGGVSISYSRFKDELAADNIKKISLKGNSISGEFRNKVPLTDSASGKPVVRDITQFTTIKPAIEDPSLMADLQSKKVDVTAVTTEVSPLLSGLLYLLPWILIIGVWWLAMRGMRGQSPGAMMGGFAKSGAQMYTPGEKSRVTFDDVAGMENAKLELREIVDYLRDPKKFQQIGGKVPKGVLLVGPPGTGKTLLARAVAGEAGVTFLSITASQFIEMFVGVGAGRVRDLFATAKKSAPSIIFIDEIDAVGRSRGAGLGGGHDEREQTLNQLLSEMDGFDPHDEVIVMAATNRPDVLDAALLRPGRFDRHVVIDRPDWRDREKILQVHTRKIPMDKDVSLAVIARGTPGMTGADLENLVNEAAILAARENSSTVTMEHLERAKDKVLMGGERKMYITDQEKRITAYHEAGHTLVAKLLPGTDPVHKVTIIPRGQALGVTQQLPEDDRYHYSKTYLVNRLSVALGGRVAERLVFGDLSTGAQNDLKMVNDLAEKMVCQWGMSDKIGAMTFRRGEEHPFLGRKLAEEKTFSEQMAWLIDQEIAVVIKEAEAKAEEIITGNRDKLDILVEALIEEETLDGKRINGLLGLAERQ

SEQ ID NO: 23099 - protein, 402 aa, Dermacentor variabilis
MAAAAVTTPPVAPVGDQIEKYREDYRKKLTEHKEVESRLKEMREQLKELNKQYEKSENDLKALQSVGQIVGEVLKQLTEEKFIVKATNGPRYVVGCRRQLDKAKLKPGTRVALDMTTLTIMRYLPREVDPLVYNMSHEDPGNISYSMIGGLAEQIRELREVIELPLLNPELFQRVGITPPKGCLLYGPPGTGKTLLARAVASQIEANFLKVVSSAIVDKYIGESARLIREMFNYARDHQPCVIFMDEIDAIGGRRFSEGTSADREIQRTLMELLNQMDGFDSLGQVKIIMATNRPDTLDPALLRPGRLDRKIEIPLPNEQARLDIVKIHATPITKHGEVDWEAVVKLSDGFNGADLRNVCTEAGMFAIRADREFVIEEDFMKAVRKVADNKKLESKLDYKPV

SEQ ID NO: 23100 - protein, 706 aa, Plasmodium falciparum 3D7
MLLLRNIVILDLKRSNKLLNINNLPKIACILNTRKGFSVLKNERLDRLKREVRNKPNDNFLILQFYKEANVHNPNEVIKHYENANYIKDESITKEYIKALVYTNKLKYTNLDNIKYDSDHNMYNKSMHDTTTNEMHSNERSNNIYEGNNVNSENNYNNMSSNHSTHKVEYMDKKRNQHPEMYSLHIDPKKPLKVSVIDSNKKGLWNLLKSTIGFLILVAAGSVYMEGVSQNVQKGIGVSNKKIIPVENVKVTFADVKGCDEVKQELEEIIDYLKNSDKFTKIGAKLPKGILLSGEPGTGKTLIARAIAGEANVPFLQASGSEFEEMFVGVGARRIRELFQAAKKHAPCIVFIDEIDAVGSKRSSRDNSAVRMTLNQLLVELDGFEQNEGIVVICATNFPQSLDKALVRPGRLDKTIVVPLPDIKGRYEILKMYSNKIVLSKDVDLHVLSRRTVGMTGADLNNILNIAAIKCSVEGKKSVDMNSIEQAFDRVVVGLQRKSPLNEEEKNITAYHEGGHTLVNFYTKGSDPVHKATIMPRGMSLGVTWKIPISDKYSQKIKDVQSEIDILMGGLVSEEIIFGKNNVTTGCSSDLQKATHIAQSLVMNYGVGINEDNISMFLHDKQNISEEMKIKIDKSIQRILLDSYNRAKNVLNQHIDELHRIASALVEYETLTSDEIKLAMQGKCDQIRKNREIKQKEYNLKDSRIS

SEQ ID NO: 23101 - protein, 880 aa, Plasmodium falciparum 3D7
MSSKYDNQSFLSTGSDKYGEQENSVLLHDEEDEYINENKKKRNERDKKFRYYENFFNRRRSKKWNYFIIFFLGVCLGFAIWPFFMTIITYRLFYKDNFNNTNYRTNNSSTSLKSYGNEKNKKSDNNGKVPMKDQSPNKVSPHFKPIRFEEIAGIDESKLELLEVVDFIKNREKYHEMGARMPKGVLLVGPPGSGKTMLARAVATEANVPYIYTSGPEFIEIYVGQGAKRIRQLFAHARSVAPSIVFIDEIDAIGGKRSSGSVNGAGQREHDQTLNQLLVEMDGFSNTVHIMVIGATNRIDTLDSALLRPGRFDRIVYVPLPDINGRKKILEIYIKKIKSDLKLEDIEKIARLTPGFSGADLENVVNEATILATRNNKSLVTINELYEARDKVSMGPERKSLRQSDHQRRITAYHEAGHAIVAYFLQPKTDPIHKATIISRGNALGYVEQIPVDDRHNYFKSQMEAKLAVCMGGRTAEEIVFGKSETSSGASSDISRATEIAYKMVTEWGMSDKLGPLNYKKRMGDGYSSNRLSAQTVSSIEVEVKSLVEKGKSLSEEILRRHRKELDNLAFALLDKETLSGEEIKNIIDPNNSKNYSGKVEMLKNDTKKNEKKSNSVSKNKSTISEDYDKNQNNVEQNYQSHDHTLVKNEENLNNMKNDIDDNNTRDGQVNSDSFVKRKEVTDQDINGKELSEMDNKEIKENKKLDGEELNKIIIDNDKMGDMKKNIKEVIKKMKKKQSKGSYKTYKNVLKSVSEHKELKTQKKADENKIVADNNEKSSNNSLDKNNTQGSIDEKGYKNNNNNNNNMVKNINELFEENFPEYKKYDNENNDFVKTKENYFDNFNEVIDISHIKNVDEMKKFNIFEHNLNKLFLFDIFKSD

SEQ ID NO: 23102 - protein, 1052 aa, Plasmodium falciparum 3D7
MYRADIIRKKSTCLLLPSEKNAFQKKKWLLKKSLDNLLDYNNTQKECLHSLSYLKDRINNNNNNNMKNGYKELAVCSSSIKYNSNVDYNIFFDSLNFICEHVQNIWSNKNKHVQINENISNMFVKFLKKYNHFKNGNYKIKNRLYKKDSFIKPSNYLQSFLLNGKCDEGEKIIKKILKDNKSLKSIKKKIMRKNEDFIWSRERNMTNLSGHNQSEHTLGESIINNNNNNNIINNVIKKHMSFTNSRYIGFLNNNVSKYKLNFFQFLKNMYLSKAPKGFERFENKSPNSNNFKPEEEKPRKYDNYFFYIFFILLLFFLLFVDSNGLYNEITQNDFFYKYLSKGYVEKIKLINKDYVKAYLNSHGIKKYHMKYVSFRVGNSDSFEKKVEAVQREMNIKRDELIEVQYVNEANILNEVKGYIPSILFFLLLIFLFQKITLKNVTNSGMDKLFKFSKISPINKNSLKTDVKFSSVAGMKQAKEEIMEFVDFLKNPTKYEILGAKIPKGALLCGAPGTGKTLLAKAVAGEANVPFFNISGSDFIEVFVGIGPSRVRELFAQARKHAPSIIFIDEIDAVGRKRSKGGFSGGGNDERENTLNQMLVEMDGFHTSNDKVVVLAGTNRVDILDPAITRPGRFDRIVNISKPDINERSEIFQVHLKNLKLHESLDIKNISYILASLTPGFVGADIANVVNEGAIQCARRSNLLGVQIKDFELAIERVIGGLPKSSSLISPLEKKIISYHETGHALIGWFLEFADPVLKVSIIPRNNGALGYSQHLSEEIMLFSRDAILDKIAVILGGRAAEELFIGKITTGAIDDLNKVTQLAYSYVSQYGMNQEIGLVSFQPNSNSEYNLYRPHSECLAHLIDNEVRSLIETQYKRVKSILMKNEKHVHNLANLLYEKETISYHDIVKCVGERPYPVKSAYEKFVKANPYKAISSEPLLEDKKESDNMKGDTSNIGNVNTNDFEKGHIKENTKECTKENTKENTKDNTKENTKENTKEYTKDNTKNQYNILGNSSKDDTKQTSSKLNEEKCKEKLGDSKKKDNKISNVKLR

SEQ ID NO: 23103 - protein, 695 aa, Arabidopsis thaliana
MAASSACLVGNGLSVNTTTKQRLSKHFSGRQTSFSSVIRTSKVNVVKASLDGKKKQEGRRDFLKILLGNAGVGLVASGKANADEQGVSSSRMSYSRFLEYLDKDRVNKVDLYENGTIAIVEAVSPELGNRVERVRVQLPGLSQELLQKLRAKNIDFAAHNAQEDQGSVLFNLIGNLAFPALLIGGLFLLSRRSGGGMGGPGGPGNPLQFGQSKAKFQMEPNTGVTFDDVAGVDEAKQDFMEVVEFLKKPERFTAVGAKIPKGVLLIGPPGTGKTLLAKAIAGEAGVPFFSISGSEFVEMFVGVGASRVRDLFKKAKENAPCIVFVDEIDAVGRQRGTGIGGGNDEREQTLNQLLTEMDGFEGNTGVIVVAATNRADILDSALLRPGRFDRQVSVDVPDVKGRTDILKVHAGNKKFDNDVSLEIIAMRTPGFSGADLANLLNEAAILAGRRARTSISSKEIDDSIDRIVAGMEGTVMTDGKSKSLVAYHEVGHAVCGTLTPGHDAVQKVTLIPRGQARGLTWFIPSDDPTLISKQQLFARIVGGLGGRAAEEIIFGDSEVTTGAVGDLQQITGLARQMVTTFGMSDIGPWSLMDSSAQSDVIMRMMARNSMSEKLAEDIDSAVKKLSDSAYEIALSHIKNNREAMDKLVEVLLEKETIGGDEFRAILSEFTEIPPENRVPSSTTTTPASAPTPAAV

SEQ ID NO: 23104 - protein, 685 aa, Arabidopsis thaliana
MAASSACLLGNGLSVYTTKQRFQKLGLDRTSKVTVVKASLDEKKHEGRRGFFKLLLGNAAAGVGLLASGNANADEQGQGVSSSRMSYSRFLEYLDKGRVEKVDLYENGTIAIVEAVSPELGNRIQRVRVQLPGLSQELLQKLRAKNIDFAAHNAQEDQGSPILNLIGNLAFPVILIGGLFLLSRRSSGGMGGPGGPGFPLQIGQSKAKFQMEPNTGVTFDDVAGVDEAKQDFMEVVEFLKKPERFTAVGARIPKGVLLVGPPGTGKTLLAKAIAGEAGVPFFSISGSEFVEMFVGVGASRVRDLFKKAKENAPCIVFVDEIDAVGRQRGTGIGGGNDEREQTLNQLLTEMDGFEGNTGVIVVAATNRADILDSALLRPGRFDRQVSVDVPDVKGRTDILKVHSGNKKFESGVSLEVIAMRTPGFSGADLANLLNEAAILAGRRGKTAISSKEIDDSIDRIVAGMEGTVMTDGKSKSLVAYHEVGHAICGTLTPGHDAVQKVTLIPRGQARGLTWFIPSDDPTLISKQQLFARIVGGLGGRAAEEVIFGESEVTTGAVSDLQQITGLAKQMVTTFGMSEIGPWSLMDSSEQSDVIMRMMARNSMSEKLANDIDTAVKTLSDKAYEIALSQIRNNREAMDKIVEILLEKETMSGDEFRAILSEFTEIPPENRVASSTSTSTPTPASV

SEQ ID NO: 23105 - protein, 662 aa, Arabidopsis thaliana
MAASSACLLGNGLSVYTTKQRFQKLGLDRTSKVTVVKASLDEKKHEGRRGFFKLLLGNAAAGVGLLASGNANADEQGQGVSSSRMSYSRFLEYLDKGRVEKVDLYENGTIAIVEAVSPELGNRIQRVRVQLPGLSQELLQKLRAKNIDFAAHNAQEDQGSPILNLIGNLAFPVILIGGLFLLSRRSSGGMGGPGGPGFPLQIGQSKAKFQMEPNTGVTFDDVAGVDEAKQDFMEVVEFLKKPERFTAVGARIPKGVLLVGPPGTGKTLLAKAIAGEAGVPFFSISGSEFVEMFVGVGASRVRDLFKKAKENAPCIVFVDEIDAVGRQRGTGIGGGNDEREQTLNQLLTEMDGFEGNTGVIVVAATNRADILDSALLRPGRFDRQVSVDVPDVKGRTDILKVHSGNKKFESGVSLEVIAMRTPGFSGADLANLLNEAAILAGRRGKTAISSKEIDDSIDRIVAGMEGTVMTDGKSKSLVAYHEVGHAICGTLTPGHDAVQKVTLIPRGQARGLTWFIPSDDPTLISKQQLFARIVGGLGGRAAEEVIFGESEVTTGAVSDLQQITGLAKQMVTTFGMSEIGPWSLMDSSEQSDVIMRMMARNSMSEKLANDIDTAVKTLSDKAYEIALSQIRNNREAMDKIVEILLEKETMSGDEFRAILSEF

SEQ ID NO: 23106 - protein, 687 aa, Arabidopsis thaliana
MKMASSSSALSFPLSNIPTCSKKSQQFQKPASLSKSSHTHKPSLKTQILHHKFTKRNLLSLTTALGFTSALGTVLAHPAKAEPEAPIEATSNRMSYSRFLQHLKENEVKKVDLIENGTVAIVEISNPVVGKIQRVRVNLPGLPVDLVREMKEKNVDFAAHPMNVNWGAFLLNFLGNLGFPLILLVSLLLTSSSRRNPAGPNLPFGLGSKAKFQMEPNTGITFEDVAGVDEAKQDFEEIVEFLKTPEKFSALGAKIPKGVLLTGPPGTGKTLLAKAIAGEAGVPFFSLSGSEFIEMFVGVGASRARDLFNKAKANSPCIVFIDEIDAVGRMRGTGIGGGNDEREQTLNQILTEMDGFAGNTGVIVIAATNRPEILDSALLRPGRFDRQVSVGLPDIRGREEILKVHSRSKKLDKDVSLSVIAMRTPGFSGADLANLMNEAAILAGRRGKDKITLTEIDDSIDRIVAGMEGTKMIDGKSKAIVAYHEVGHAICATLTEGHDPVQKVTLVPRGQARGLTWFLPGEDPTLVSKQQLFARIVGGLGGRAAEDVIFGEPEITTGAAGDLQQVTEIARQMVTMFGMSEIGPWALTDPAVKQNDVVLRMLARNSMSEKLAEDIDSCVKKIIGDAYEVAKKHVRNNREAIDKLVDVLLEKETLTGDEFRAILSEYTDQPLNTDGDVRIRINDLISV

SEQ ID NO: 23107 - protein, 501 aa, Arabidopsis thaliana
RSSGGMGGPGGPGFPLQIGQSKAKFQMEPNTGVTFDDVAGVDEAKQDFMEVVEFLKKPERFTAVGARIPKGVLLVGPPGTGKTLLAKAIAGEAGVPFFSISGSEFVEMFVGVGASRVRDLFKKAKENAPCIVFVDEIDAVGRQRGTGIGGGNDEREQTLNQLLTEMDGFEGNTGVIVVAATNRADILDSALLRPGRFDRQVSVDVPDVKGRTDILKVHSGNKKFESGVSLEVIAMRTPGFSGADLANLLNEAAILAGRRGKTAISSKEIDDSIDRIVAGMEGTVMTDGKSKSLVAYHEVGHAICGTLTPGHDAVQKVTLIPRGQARGLTWFIPSDDPTLISKQQLFARIVGGLGGRAAEEVIFGESEVTTGAVSDLQQITGLAKQMVTTFGMSEIGPWSLMDSSEQSDVIMRMMARNSMSEKLANDIDTAVKTLSDKAYEIALSQIRNNREAMDKIVEILLEKETMSGDEFRAILSEFTEIPPENRVASSTSTSTPTPASV

SEQ ID NO: 23108 - protein, 443 aa, Brassica napus
MGQGPSGGLNRPGDRKPDGNEKKEKKFEPAAPPSRVGRKQRKQKGPEAAARLPTVTPSTKCKLRLLKMERIKDYLLMEEEFVANQERLKPQEEKAEEDRSKVDDLRGTPMSVGNLEELIDENHAIVSSSVGPEYYVGILSFVDKDQLEPGCSILMHNKVLSVVGILQDEVDPMVSVMKVEKAPLESYADIGGLEAQIQEIKEAVELPLTHPELYEDIGIKPPKGVILYGEPGTGKTLLAKAVANSTSATFLRVVGSELIQKYLGDGPKLVRELFRVADDLSPSIVFIDEIDAVGTKRYDANSGGEREIQRTMLELLNQLDGFDSRGDVKVILATNRIESLDPALLRPGRIDRKIEFPLPDIKTRRRIFQIHTSKMTLSEDVNLEEFVMTKDEFSGADIKAICTEAGLLALRERRMKVTHPDFKKAKEKVMFKKKEGVPEGLYM

SEQ ID NO: 23109 - protein, 425 aa, Prunus persica
MAPEPEDIKDEKNPRPLDEDDIALLKTYGLGPYSTHIKKAEKEVKDLAKKVNDLCGIKESDTGLAAPSQWDLVSDKQMMQEEQPLQVARCTKIINPNSEDAKYVINVKQIAKFVVGLGDKVSPTDIEEGMRVGVDRNKYQIQIPLPPKIDPSVTMMTVEEKPDVTYNDVGGCKEQIEKMREVVELPMLHPEKFVKLGIDPPKGVLCYGPPGTGKTLLARAVANRTDACFIRVIGSELVQKYVGEGARMVRELFQMARSKKACIVFFDEVDAIGGARFDDGVGGDNEVQRTMLEIVNQLDGFDARGNIKVLMATNRPDTLDPALLRPGRLDRKVEFGLPDLESRTQIFKIHTRTMNCERDIRFELLARLCPNSTGADIRSVCTEAGMYAIRARRKTVTEKDFLDAVNKVIKGYQKFSATPKYMVYN

SEQ ID NO: 23110 - protein, 645 aa, Sinorhizobium meliloti
MNPNFRNFALWAIIALLLIALFSMFQQPTERAGSREIPFSQFLKDVDASRVKDVVITGSKVIGSYTESGATFQTYAPAVDTALTERLEAKDVTVTVRPETDGSSGFLSYIGTLLPMLLILGVWLFFMRQMQGGSRGAMGFGKSKAKLLTEAHGRVTFDDVAGVDEAKQDLEEIVEFLRDPQKFQRLGGRIPRGVLLVGPPGTGKTLLARSVAGEANVPFFTISGSDFVEMFVGVGASRVRDMFEQAKKNAPCIIFIDEIDAVGRHRGAGLGGGNDEREQTLNQLLVEMDGFEANEGIILIAATNRPDVLDPALLRPGRFDRQVVVPNPDINGRERILKVHVRNVPLAPNVDLKVLARGTPGFSGADLMNLVNESALMAARRNKRLVTMQEFEDAKDKIMMGAERRSSAMTEAEKKLTAYHEAGHAILALNVPSADPLHKATIIPRGRALGMVMQLPEGDRYSMSYKWMISRLAIMMGGRVAEELTFGKENITSGASSDIEQATKLARAMVTQWGFSDQLGQVAYGENQQEVFLGHSVAQQKNVSESTAQKIDNEIRRLIDEAYETARRILVEKNHEFVALAEGLLEYETLTGDEIKALIRGEKPARDLGDDTPPHRGSAVPSAGTKKEAGTKGEEPEGGFEPQPQ

SEQ ID NO: 23111 - protein, 691 aa, Glycine max
MAAPLACLVGSGLSIQSNKLTLGKDVNGRYLFSYHRLSAQSKESKTICIKASLDQRKHEGRRGFLKLLNVGVGLPVLLGGGKAYADEQGPSSSRMSYSRFLEYLDKGRVKKVDLFENGTSAVVEAVSPELGNRVQRVRVQFPGLSQELLQKFREKNIDFAAHNGQEETGSPLANLIGNLAFPLILIGGLFLLSRRSGGMGGPGGPGFPLAFGQSKAKFQMEPNTGVTFDDVAGVDEAKQDFMEVVEFLKKPERFTAVGARIPKGVLLVGPPGTGKTLLAKAIAGEAGVPFFSISGSEFVEMFVGVGASRVRDLFKKAKENAPCIVFVDEIDAVGRQRGTGIGGGNDEREQTLNQLLTEMDGFEGNTGIIVIAATNRVDILDSALLRPGRFDRQVTVDVPDIRGRTEILKVHASNKKFDADVSLEVIAMRTPGFSGADLANLLNEAAILAGRRGKTAISSKEIDDSIDRIVAGMEGTVMTDGKSKSLVAYHEVGHAICGTLTPGHDAVQKVTLVPRGQARGLTWFIPNDDPTLISKQQLFARIVGGLGGRAAEEIIFGEPEVTTGAAGDLQQITSLAKQMVTTFGMSDIGPWSLMESSAQSGDVIMRMMARNSMSEKLAEDIDAAVKRLSDEAYEIALSQIRSNREAIDKIVEVLLEKETMSGDEFRALLSEFVEIPAENRVPPSTPSPVVV

SEQ ID NO: 23112 - protein, 698 aa, Glycine max
  unsure (1)..(698): unsure at all Xaa locations
MAASSACLVGNGLSTRGNRITLKKDFNGRRYLYSSWRFSLLNNNKASKVSIKASLEQRQEEGRRGFLKLLLGNLGVGLPALLGSGKAYADEQGVSSSRMSYSRFLEYLDKDRVKKVDLYDNGNTAVVEAVSPELGNRSQYVRVQLPGLNQELLQKFREKNIDFAAHSPQEESGSLLANLIGNLAFPLLLIGGLFLLSRRSGGMGGPGGPGFPLAFGQSKAKFQMEPNXPGVPFXDDVAXGVDEAQQDFMEVVEFLKKPERFTAVGARIPKGVLLVGPPGTGKTLLAKAIAGEAGVPFFSISGSEFVEMFVGVGASRVRDLFKKAKENAPCIVFVDEIDAVGRQRGTGIGGGNDEREQTLNQLLTEMDGFEGNTGIIVVAATNRADILDSALLRPGRFDRQVTVDVPDIRGRTEILKVHASNKKFDADVSLEVIAMRTPGFSGADLANLLNEAAILAGRRGKTAISSKEIDDSIDRIVAGMEGTVMTDGKSKSLVAYHEVGHAICGTLTPGHDAVQKVTLVPRGQARGLTWFIPNDDPTLISKQQLFARIVGGLGGRAAEEIIFGEPEVTTGAAGDLQQITSLAKQMVTTFGMSDIGPWSLMEPSAQGGDVIMRMMARNSMSERLAEDIDAAIKRISDEAYEIALEHIRNNREAIDKIVEVLLEKETLSGDEFRAILSEFVEIPAENRVAPSTPVPATV

SEQ ID NO: 23113 - protein, 690 aa, Glycine max
MAAPLACLVGSGLSIQSNKLTLGKDVNGRYLFSYHRLSAQSKESKTICIKASLDQRKHEGRRGFLKLLNVGVGLPVLLGGGKAYADEQGPSSSRMSYSRFLEYLDKGRVKKVDLFENGTSAVVEAVSPELGNRVQRVRVQFPGLSQELLQKFREKNIDFAAHNGQEETGSPLANLIGNLAFPLILIGGLFLLSRRSSGGMGGPGGGFPLAFGQSKAKFQMEPNTGVTFDDVAGVDEAKQDFMEVVEFLKKPERFTAVGARIPKGVLLVGPPGTGKTLLAKAIAGEAGVPFFSISGSEFVEMFVGVGASRVRDLFRKAKENAPCIVFVDEIDAVGRQRGTGIGGGNDEREQTLNQLLTEMDGFEGNTGIIVIAATNRVDILDSALLRPGRFDRQVTVDVPDIRGRTEILKVHGSNKKFEADVSLEVIAMRTPGFSGADLANLLNEAAILAGRRGKTAISSKEIDDSIDRIVAGMEGTVMTDGKSKSLVAYHEVGHAICGTLTPGHDPVQKVTLVPRGQARGLTWFIPADDPTLISKQQLFARIVGGLGGRAAEEVIFGEPEVTTGAAGDLQQITSLAKQMVTTFGMSDIGPWSLMDSSAQSDVIMRMMARNSMSEKLAEDIDAAVKRLSDEAYEIALSQIRSNREAIDKIVEVLLEKETMSGDEFRALLSEFVEIPAENRVPPSTPSPVVV

SEQ ID NO: 23114 - protein, 717 aa, Glycine max
  unsure (1)..(717): unsure at all Xaa locations
MSLLLFQFLHSLSQVLCFEVLFFIRMAAPLACLVGSGLSIQSNKLTLGKDVNGRYLFSYHRLSAQSKEXTKTICIKASLDQRKHEGRRGFLKLXXNVGVGFPVLLGGGKAYGGGQGAYSSRMSYXVFLKYSNKGTLNKIGSFIEKQRIEGEEFRVLLGEMVKIAGDKRVPLSIAYHMLFEXPILHXKGLTPGYXRISSIADIIGKLAFPLFILVGLFLLSTQSWGGMGCPGGGFPLAFGQSKAKFQMEPNTGVTFDDVAGVDEAKQDFMEVVEFLKKPERFTAVGARIPKGVLLVGPPGTGKTLLAKAIAGEAGVPFFSISGSEFVEMFVGVGASRVRDLFRKAKENAPCIVFVDEIDAVGRQRGTGIGGGNDEREQTLNQLLTEMDGFEGNTGIIVIAATNRVDILDSALLRPGRFDRQVTVDVPDIRGRTEILKVHGSNKKFEADVSLEVIAMRTPGFSGADLANLLNEAAILAGRRGKTAISSKEIDDSIDRIVAGMEGTVMTDGKSKSLVAYHEVGHAICGTLTPGHDPVQKVTLVPRGQARGLTWFIPADDPTLISKQQLFARIVGGLGGRAAEEVIFGESEVTTGAVGDLQQITSLAKQMVTTFGMSDIGPWSLMDSSAQSDVIMRMMARNSMSEKLAEDIDAAVKRLSDEAYEIALSQIRSNREAIDKIVEVLLETETMSGDEFRALLSEFVEIPAENRVPPSTPSPVVV

SEQ ID NO: 23115 - protein, 693 aa, Capsicum annuum
MATSSVCIAGNGLSTHKTQKVFKKDVYGRKILYSSNLPSSGKTSRVVVKASLQQRPDEGRRGFLKLLLGNVGLGAPALLGNGKAYADEQGVSNSRMSYSIFSEYLDKDRVQKVDLFENGTIAIVEAVSPELGNRVQRVRVQLPGLSQELLQKFREKNIDFAAHNAQEDSGSLIFNLIGNLAFPLILIGGLFLLSRRSNGGMGGPGGPGNPLAFGQSKAKFQMEPNTGVTFDDVAGVDEAKQDFMEVVEFLKKPERFTAVGARIPKGVLLVGPPGTGKTLLAKAIAGEAGVPFFSISGSEFVEMFVGVGASRVRDLFKKAKENAPCIVFVDEIDAVGRQRGTGIGGGNDEREQTLNQLLTEMDGFEGNTGIIVVAATNRADILDSALLRPGRFDRQVSVDVPDIKGRTEILKVHAGNKKFDSDVSLEVIAMRTPGFSGADLANLLSEAAILAGRRGKTAIASKEIDDSIDRIVAGMEGTVMTDGKSKSLVAYHEVGHAICGTLTPGHDPVQKVTLIPRGQAKGLTWFIPADDPTLISKQQLFARIVGGLGGRAAEEVIFGAPEVTTGAAGDLQQITSLAKQMVVTFGMSELGPWSLMDASAQSGDVIMRMMARNSMSEKLAEDIDAAVKRLSDSAYEIALSQIRSNREAIDKIVEVLLEQETMTGDEFRAILSEFVEIPAENRVPAAVPTPAAV

SEQ ID NO: 23116 - protein, 693 aa, Nicotiana tabacum
MATSSVCIAGNSLSTHRRQKVFRKDIYGRKILFSSNLPSSSKTSRIAVKASLQQRPDEGRRGFLKLLLGNVGLGVPALLGDGKAYADEQGVSNSRMSYSRFLEYLDKDRVQKVDLFENGTIAIVEAISPELGNRVQRVRVQLPGLSQELLQKLREKNIDFAAHNAQEDSGSFLFNLIGNLAFPLILIGGLFLLSRRSPGGMGGPGGPGNPLAFGQSKAKFQMEPNTGVTFDDVAGVDEAKQDFMEVVEFLKKPERFTAVGARIPKGVLLVGPPGTGKTLLAKAIAGEAGVPFFSISGSEFVEMFVGVGASRVRDLFKKAKENAPCIVFVDEIDAVGRQRGTGIGGGNDEREQTLNQLLTEMDGFEGNTGIIVVAATNRADILDSALLRPGRFDRQVSVDVPDIKGRTEILKVHAGNKKFDSDVSLEVIAMRTPGFSGADLANLLNEAAILAGRRGKTAIASKEIDDSIDRIVAGMEGTVMTDGKSKSLVAYHEVGHAICGTLTPGHDAVQKVTLIPRGQAKGLTWFIPADDPTLISKQQLFARIVGGLGGRAAEEVIFGEPEVTTGAAGDLQQITGLAKQMVVTFGMSELGPWSLMDSSAQSGDVIMRMMARNSMSEKLAEDIDGAVKRLSDSAYEIALTHIRNNREAIDKIVEVLLEKETMTGDEFRAILSEFVEIPAENRVAPVVPTPATV

SEQ ID NO: 23117 - protein, 413 aa, Solanum tuberosum
MATAMVLDPKPAEKLPATRPETSITDVPSDGEDDLYARLKSLQRQLEFIEIQEEYVKDELKNLRREHLRAQEEVKRIQSVPLVIGQFMEMIDQNNAIVGSTTGSNYYVRILSTINRELLKPSASVGLDRHSNALVDVLPPEADSSISLLSQSEKPDVTYNDIGGCDIQKQEIREAVELPLTHHELYKQIGIDPPRGVLLYGPPGTGKTMLAKAVAHHTTAAFIRVVGSEFVQKYLGEGPRMVRDVFRLAKENAPAIIFIDEVDAIATARFDAQTGADREVQRILMELLNQMDGFDQTVNVKVIMATNRADTLDPALLRPGRLDRKIEFPLPDRRQKRLVFQVCTAKMNLGDEVDLEDYVSRPDKISAAEITAICQEAGMHAVRKNRYVILPKDFEKGYRTNVKKPDTDFEFYK

SEQ ID NO: 23118 - protein, 398 aa, Solanum tuberosum
MATEEDAVRRRTALADYRKKLLQHKELDARVRTVRENLRATKKEYAKTEDDLKSLQSVGQIIGEVLRPLDNERLIVKASSGPRYVVGCRSKVDKEKLTSGTRVVLDMTTLTIMRALPREVDPVVYNMLHEDPGNISYSAVGGLSDQIRELRESIELPLMNPELFLRVGIKPPKGVLLYGPPGTGKTLLARAIASNIDANFLKVVSSAIIDKYIGESARLIREMFNYARDHQPCIIFMDEIDAIGGRRFSEGTSADREIQRTLMELLNQLDGFDQLGKVKMIMATNRPDVLDPALLRPGRLDRKIEIPLPNEQSRMEILKIHAAGIAKHGEIDYEAAIKLAEGFNGADMRNVCTEAGMFAIRAERDYVIHEDFMKAVRKLNEAKKLESSAHYSADFGKE

SEQ ID NO: 23119 - protein, 890 aa, Mesostigma viride
MQQNHMSLSNMIKEVKEVFFHVPALLIPTRYREIYREIDRAPKLLEQSFYTIFIKVWNITEKVTVTDVFYYSSVEDPLGLQSPRHSRWAQNTDEEQRKQARIIIQSVYKPNSFIRITSNKFTRVLITSLFVLTYFQSNGVFQSFPYFESQINGFLFKKMNNINQLEINSTNTCIIKITDLLTHQKSKELLGNSLPTNSILRWKMHSKISDIKTIFNMPEKWIYLPLGLGLENSEQIFSYRNFDICNLTKNSSNIMKIKNNRTILDPKIDKYPLVLKNKENILFFHKLPIQFFLFPYIVLRIWLAPVFVLWWSYQFNSEEKENIKNNLKNIHDIEISTIQKFVAKAITFRDIGGMESLKQELATVAFLLKQKNYSNSYPMGYLFAGPPGTGKTLMAKAMSYEAETPYLYVEGSQFRCREEGVANARVDDLFKQIQNISPCILYIDEIDSIAERREEANKQLEQLKTIGDSIEGSNINIDQKPSDTVLMQFLIYMDGYKKRNDLIIIGATNRIETLDDAIMRPGRFDRQIVFSPPFFEERKDILRIFLRNTKALVDDTTKTMMAERSIGLNGCDLRLLADNILLLSALESRNQQKTIPVINEDTFDRALERVSRIRHIISNYELAFGKYDFYRTAYHEAGIALIHTLLPECRPVYSVKLFPKPLNDRYLEIERENLKVPSSDIISTNNIDYFVQKIVGLLAGRAAESILFDFYPGQISTYLNKTYDPNIQGAYNIAHHIVEFGLLDSVTGVIHYLNSENENNIKDPFVTKINDLIQNKVTLKTNRELRKYSQAASILDFNEFWYEQDYPWQFDFIKKQYIYSNESSRNLDMEIVSILHTLFQYTYDFLKSNEQLLDHLASLVLKNKSISQKEIHLVVNSYGIKIPTKTWKAW

SEQ ID NO: 23120 - protein, 844 aa, Dictyostelium discoideum
MSSSSNILKTTKILFSTASNNATTKKSRLISYLNRSLINNNENNKIPQSIIDNNNNSNRNILKCNIYSSFNNNKIENNKLFISEIQSNFKRFSSSSPPPKSPKDEDNEKKFENEKETTVKQDKNKNDVENKKENENEKVKDEKEKDEKEKEEKEEEKENKEEKENEEENKDKEDKKKGNQPDSPISSFFTPRAAAILAIVAANILIFTFIKPQNDEIDYQTFRNKILPNAEIHSILLTNTTAEVVEKVQPEVGGSGIGSLKVHTITIISPEDFQRKLQEDQDALGIPLNKQVFATFNHTNKILRELVAISPTLLMIGLLIYFSRGINSSLTKGASSLFKSKSKAVKATSTTTFKDVAGMDEAKEEIMEFVSFLKDPSRYKKLGARIPKGAILSGPPGTGKTLLAKATAGEAGVNFYTISGSDFIEMFVGVGPSRVRDLFKEARANTPCIVFIDEIDAVGRARSRGGFHNDERENTLNQLLVEMDGFSSTSGVVVFAGTNRSDVLDPALLRPGRFDRQIYVGKPDIKGRKDIFMVHLKNIKLDGEMEEIAKKLATLTPGFSGADIANVCNEGALVAARKDATSANFDHFEEAIERVLVGLKRENRVLSPEERTIVAHHEAGHAVVGWFLEHTDPLLKVSIVPRGSGTLGFAQYQPKDQYLYTREQLFDRICVSLGGRIAESIIFDRISTGAMDDLDKVTKMASASVVNYGMSEKVGVASFRKEGDDITVVKPYSQATARMIDEEIRRMVNDAYSKTTQLLHEKKELLIKLATILLEKEVIQRDDLRTILGPRPYGEQTTWAELTGETENEKIKEAELSTESQQKEVDSIEPQQPKEENSDENLKK

SEQ ID NO: 23121 - protein, 729 aa, Oryza sativa
  unsure (1)..(729): unsure at all Xaa locations
PSERRRKNQSAATLLVGVGLFIHSTPSSLPFLVRPTPPPSPLHAPLRSTQXAKMAPTSMSLAAKTPLPFSTLPSSGVAQRPVSVTASLEHKTNDARRKFLKLALGNLGVGLPTLLGAKRALAEEQGVSSSRMSYSRFLEYLDKDRVKKVDLFENGTIAIVEAISPELGNRVQRVRVQLPGLSQELLQKLREKNIDFAAHSNQEDSGSLLFNLIGNLAFPLILIGGLFLLSRRAQGGLGGPNGPGFPLGFGQSRAKFQMEPNTGVTFDDVAGVDEAKQDFMEVVEFLKKPERFTAVGARIPKGVLLVGPPGTGKTLLAKAIAGEAGVPFFSISGSEFVEMFVGVGASRVRDLFKKAKENAPCIVFVDEIDAVGRQRGTGIGGGNDEREQTLNQLLTEMDGFEGNTGIIVIAATNRADILDSALLRPGRFDRQVSVDVPDVRGRTEILKVHGSNKKFDTDVSLEVIAMRTPGFSGADLANLLNEAAILAGRRGRTAISSKEIDDSIDRIVAGMEGTVMTDGKSKSLVAYHEVGHAICGTLTPGHDPVQKVTLIPRGQARGLTWFIPMDDPTLISRQQLFARIVGGLGGRAAEEIIFGEPEVTTGAAGDLQQITGLAKQMVVTFGMSDIGPWSLMDSGAQSGDVIMRMMARNSMSEKLAEDIDTAVKRLSDEAYEIALSQIRSNREAMDKIVEVLLEKETLSGDEFRAILSEFTEIPVENRVPPATPAALPA

SEQ ID NO: 23122 - protein, 735 aa, Oryza sativa
  unsure (1)..(735): unsure at all Xaa locations
MAPTSMSLAAKTPLPFSTLPSSGVAQRPVSVTASLEHKTNDARRKFLKLALGNLGVGLPTLLGAKRALAEEQGVSSSRMSYSRFLEYLDKDRVKKVDLFENGTIAIVEAISPELGNRVQRVRVQLPGLSQELLQKLREKNIDFAAHSNQEDSGSLLFNLIGNLAFPLILIGGLFLLSRRAQGGLGGPNGPGFPLGFGQSRAKFQMEPNTGVTFDDVAGVDEAKQDFMEVVEFLKKPERFTAVGARIPKGVLLVGPPGTGKTLLAKAIAGEAGVPFFSISGSEFVEMFVGVGASRVRDLFKKXXADILDSALLRPGRFDRQVSVDVPDVRGRTEILKVHGSNKKFDTDVSLEVIAMRTPGFSGADLANLLNEAAILAGRRGRTAISSKEIDDSIDRIVAGMEGTVMTDGKSKSLVAYHEVGHAICGTLTPGHDPVQKVTLIPRGQARGLTWFIPMDDPTLISRQQLFARIVGGLGGRAAEEIIFGEPEVTTGAAGDLQQITGLAKQMVVTFGMSDIGPWSLMDSGAQSGDVIMRMMARNSMSEKLAEDIDTAVKRLSDEAYEIALSQIRSNREAMDKIVEVLLEKETLSGDEFRAILSEFTEIPVENRATWIQILDLIWMLALTRGDFVNLKIYRSSLPEVLIRVRLEVAKRAARPGTARARVRHGPFRHGPLGTADETGRAVSAHVPSRRPKHGPWMAGPCPCRHGTPAAHGPFGARRPVKAGRQPTVHAQCFFF

SEQ ID NO: 23123 - protein, 588 aa, Oryza sativa
  unsure (1)..(588): unsure at all Xaa locations
MAPTSMSLAAKTPLPFSTLPSSGVAQRPVSVTASLEHKTNDARRKFLKLALGNLGVGLPTLLGAKRALAEEQGVSSSRMSYSRFLEYLDKDRVKKVDLFENGTIAIVEAISPELGNRVQRVRVQLPGLSQELLQKLREKNIDFAAHSNQEDSGSLLFNLIGNLAFPLILIGGLFLLSRRAQGGLGGPNGPGFPLGFGQSRAKFQMEPNTGVTFDDVAGVDEAKQDFMEVVEFLKKPERFTAVGARIPKGVLLVGPPGTGKTLLAKAIAGEAGVPFFSISGSEFVEMFVGVGASRVRDLFKKAKENAPCIXNKKFDTDVSLEVIAMRTPGFSGADLANLLNEAAILAGRRGRTAISSKEIDDSIDRIVAGMEGTVMTDGKSKSLVAYHEVGHAICGTLTPGHDPVQKVTLIPRGQARGLTWFIPMDDPTLISRQQLFARIVGGLGGRAAEEIIFGEPEVTTGAAGDLQQITGLAKQMVVTFGMSDIGPWSLMDSGAQSGDVIMRMMARNSMSEKLAEDIDTAVKRLSDEAYEIALSQIRSNREAMDKIVEVLLEKETLSGDEFRAILSEFTEIPVENRVPPATPAALPA

SEQ ID NO: 23124 - protein, 725 aa, Triticum aestivum
  unsure (1)..(725): unsure at all Xaa locations
RARPPSSRHPRATAPHRGTQTHHPEAEPEEEEKSAAARPSPGRPVSPARYLYAPLGSAHPSPLTIAPFPPRSSAPAPLQLVSAPKHGAVHEARLXXGVLPFGALPSSGGSQRPASVTASLEHQRSDSWRLLLKLAVCGVCRAALLPANMALADDPRVSSSGISXWSFREXLDKDSVQKVHGLEEGNIAIVEDIRPEVRGDVHGDRLRLPGLXLSKFTEICVDNRVDQAAQXTGGGLGSGLLLGLEHLLLLVGDXMSLGREXXFDNVAGVDEAKHAFLEVVENQKARERFTAVGARIPKGVLLVGPPGTGKTLLAKAIAGEAGVPFFSISGSEFVEMFVGVGASRVRDLFKKAKENAPCIVFVDEIDAVGRQRGTGIGGGNDEREQTLNQLLTEMDGFEGNTGIIVVAATNRADILDSALLRPGRFDRQVSVDVPDVRGRTEILKVHGSNKKFDADVSLEVIAMRTPGFSGADLANLLNEAAILAGRRGRTGISSKEIDDSIDRIVAGMEGTVMTDGKSKSLVAYHEVGHAVCGTLTPGHDPVQKVTLVPRGQARGLTWFIPMDDPTLISRQQLFARIVGGLGGRAAEEIIFGDSEVTTGAAGDLQQITGLAKQMVVTFGMSDIGPWSLMDAAQSGDVIMRMMARNSMSEKLALDIDSAVKQLSDQAYQIALQQVRDNRVAMDKIVEVLLEKETLSGDEFRAILSEFTEIPVENRVPPTPQAAVPV

SEQ ID NO: 23125 - protein, 463 aa, Triticum aestivum
  unsure (1)..(463): unsure at all Xaa locations
TRICGRQLLVGQSVPTPLLIRSARLGSPLSPRNRPLPPSLLRPGPDPARLSKQTWRHPXVLQRKVLPFGALPSSGVAQRPVSVTASLEHKPNDSKRKLLKLALGGVGLPALLTANKALADDQGVSSSRMSYSRFLEYLDKDRVKKVDLFENGTIAIVEAISPELGNRVQRVRVQLPGLSQELLQKLREKNIDFAAHNQQEDSGNLLFNLIGNLAFPLILIGGLFLLSRRGGSGGMGGPGGPGFPLGFGQSKAKFQMEPNTGVTFDDVAGVDEAKQDFMEVVEFLKKPERFTAVGARIPXGVLLVGPPGTGKTLLAKAIAGEAGVPFFSISGSEFVEMFVGVGASRVRDLFKKAKENAPCIVFVDEIDAVGRQRGTGIGGGNDEREQTLNQLLTEMDGFEGNTGIIVVAATNRADILDSALLRPGRFDRQVSVDVPDVRRRTNQXSXGEAELTASGSAQTPNSR

SEQ ID NO: 23126 - protein, 1157 aa, Pichia pastoris
MNSIDAVVRYSPLRNNLCNLPSAITTMLFSADFNIQQIIVELSWVPHQRAAQRRIAYCGWAGGITKTSSSNPVIEIDRSLASAIDLQENVNVTVNVHIDAVKAITVELEPVTSNDWEIVETHAQVLETYLLNQTRCVYPNQVLVVYPTPQTTARLLVKKIEPEVSTFAQLFNDTEVQIAPKVQKRPSISSVRSDSSGHRIRRVRSSTSTATGRRSVTNNGEVLPSMLRRSITLPNNTYAHVNDSKSGGYKVYCNLNELIPALQNAHFVSVSVLVGPGTPDRTGLTSSKIKQLNDSIDQAAQTQTNAAGSSHPPESSYTETGKVIAELVHDSKSPKGNVGLSELLACSLGIENTVGNLISLEQARKPLIKKPTVLVLHKYTTVSPASLDRVTIKHATEEQKRVQNKKERDTLLTQLMQLLSPLLDSCTFTNCVKLPKIGTLLPNGGLLQFKRIKSGWTTPLGKDNVSLEIGEEILRPESFSPSYDLLPDRKTHVRTQSDQYPTAQENLIESLSKIASGGSLLFGTSGSGKSLVISQVAQIVTNKGHFVKLLNCDKIMSESYNNLRGIFEDIFSEVSWKAPSLLILEDLDSLIPAEQEHSDSSQSRQLSEYFISKLSAQTINRDITILASSKSKESLNSLIFTTHLIEHDFQLRAPDKEARKQILQSYLDTLNVFCSEGELLNNIAVETEGYLPKDLKVLCDRAYHDLISRDILADSDSELDIEESSTPILNGSVGDIANKQSEIENGISGLELTNNSSSTIAVDKHGATIQKDNFDSALSGYIPQSLRGVKLQKSDVRWDDIGGLRDAKSILLETLEWPTKYAPIFSSCPLRLRSGILLYGYPGCGKTLLASAVAAQCGLNFISIKGPEILNKYIGPSEQSVRELFERAQAAKPCILFFDEFDSIAPKRGHDSTGVTDRVVNQMLTQMDGAEGLDGVYVLAATSRPDLIDSALLRPGRLDKSVICDMPDFDDRLDILQSVTRNMNVSKSVNLSSVAGECSGFSGADLQALAYNAYLKAVHEKLTKDESMAMAGEMDDNDDKKRMVECFQFSGNTEKKSLIELKPSDRATVIKKLEHLYQGNGNHAEGETKSKLATTAANSVIITSKDFEDSLSETKQSISQSEKRKLEAIYQQFISGRDGNMPDGTASNEIGARSTLM

SEQ ID NO: 23127 - protein, 611 aa, Desulfitobacterium hafniense
MKKMNEKPTPKKPLIYYSLIALLILLLLNAFVFPHLLKRQVTQVDYGSFLSYLESGTISEVEVQDNQIAFMTKDSTGKETIFVTGAMADPELVNRLKAAGVDKYSQVIPKENSPLMNILLTWILPMILLFGLWMLLGNLMQRKMGGGMNAMTFGKSNAKIYVQAQTGKTFADVAGQDEAKEALTEIVDFLHDPSRYAAIGADLPKGALLVGPPGTGKTLLAKAVAGEAKVPFFSISGSEFVEMFVGMGAAKVRDLFKQANEKAPCIVFIDEIDTIGKKRDGGSFGGGNDEREQTLNQLLSEMDGFDGKKGVVILAATNRPESLDKALLRPGRFDRRIPVELPDLAGREAILRVHGQKVKMDSPIDFKAIARATAGASGAELANIINEGALRAVRCGRSRVNQSDLEESVEVVIAGYQRKGAVISHREKEIIAFHEIGHALVATKQTDSAPVHKITIIPRTSGALGYTMQVEEDERVLMSKEEAFNKITTFTGGRAAEELIFGTYTSGASNDIEQATKIARAMVTRLGMSKNFDMMALETVNNPYLGGDTSLMCSPETAARIDEEILSIIKSAHKKAFEILKENIEKLHELARYLLEKETITGEEFMAVLSR

SEQ ID NO: 23128 - protein, 314 aa, Desulfitobacterium hafniense
DESIVPSPPFPGSDFVEMFVGVGASRVRDMFEQAKKHAPCIIFIDEIDAVGRHRGAGLGGGHDEREQTLNQLLVEMDGFEGGEGVIVIAATNRPDVLDPALLRPGRFDRQVVVGLPDVKGREQILRVHMRKLPLHEDVEPMTIARGTPGFSGADLANLCNEAALFAARENAKEVRMEHFDKARDKILMGAERRSMAMSEDEKKLTAYHEAGHAIVGRVVPEHDPVYKVTIIPRGRALGVTMYLPEGDKYSMNRVAIESQLCSLYGGRVAEELIFGVDKVTTGASNDIERATKMARNMVTKWGLSDEMGPIAYGE

SEQ ID NO: 23129 - protein, 493 aa, Desulfitobacterium hafniense
MGLAKDIAMGVGVGLFLYLWVSGYNVLPIGLLVLLGVAFWKFMPRSMVGGSEKGVRISGSTVDFEDIGGQNAAKKELQEALDFLLYSERMRELGIRPLKGILLSGPPGTGKTLLAKAAARYTDSVYLAISGSEFVEMYAGVGAERVRKLFKKARESAKKEKKDRAIIFIDEMDILGAKRGSNVSHHEYDQTLNQLLVEMDGLGNSEQGTQILLIAATNRAEALDPALLRPGRFDRLVKVDLPDKEGRLAILKIHTKNKPLASCVDLEQIAQETYNFSGAHLESVTNEAAVFALRDDAREVNMFHFREAVEKVLLGEKLDRKPTDEELQRVAIHEGGHALLAEFVRPHSVSQISIRSRGNALGYVRHYPKDDLYLYTQAMIEEQIMVALAGAIAEETILGTRSTGAAGDYEQALHMVEKMLASGMSTLGVVDVVKLGADQRQQVTREILAELEERTCQVILDKKGILERVVQVLKTEEVLNGERLRLLIEEEAA

SEQ ID NO: 23130 - protein, 631 aa, Guillardia theta
MKISWKNILLTLIPLGLISFLVWQGFNNTTNPQFTKNIASSRMTYGRFLEYLDLGWVKKVDLYDEGHTAIVEAIGPELGNRIQRIRVELPATAPELITKLRKANVDLDAHATNDSTPAWSLIGNLIFPILLIAGLAFLFRRSSNLPGGPGQAMNFGKSKARFQMEAKTGVTFNDVAGVDEAKEEFEEVVSFLKKPERFTAVGAKIPKGVLLVGPPGTGKTLLAKAIAGEAGVPFFSISGSEFVEMFVGVGASRVRDLFKKAKENSPCIVFIDEIDAVGRQRGTGIGGGNDEREQTLNQLLTEMDGFEGNTGIIIIAATNRVDVLDAALLRPGRFDRQVTVDVPDVKGRLEILNVHARNKKLDLSISLELIAKRTPGFSGADLANLLNEAAILTARRRKKQITISEIDASIDRVIAGMEGKALVDSKTKRLIAYHEVGHAIIGTLLKHHDPVQKVTLVPRGQAKGLTWFTPSEDQSLISRSQILARIMGALGGRAAEEVVFGLPEVTTGAGNDLQQVTSMARQMVTRFGMSNIGPLSLESQNSDPFLGRTMGSSSQYSEDIASRIDMQVRAIIQHCHTETVQIIKDNRVVIDKLVDLLIEKETIDGDEFRQIVGDFTSLPEKIDYKSQLKST

SEQ ID NO: 23131 - protein, 806 aa, Plasmodium falciparum
MEDNTDKKALVDENNGENKVPKKKNLSRLIVEEATNDDNSVVALNTKRMEELNFFRGDTIIIKGKKRHSTICIILNDNDLDEGKIRINKVARKNLRVCLGDVVYVKSCPEIPYGKKIQVLPIDDTIEGLAKDTLFEIFLKPYFNESYRPVKKGDLFLVRGGFMSVEFKVVEVDPDDFCIVSPDTVIYYEGDPIKRDDEEKLDEIGYDDIGGCKKQLAQIREMIELPLRHPGLFKTLGVKPPRGVLLYGPPGSGKTCIARAVANETGAFFFLINGPEVMSKMAGEAEANLRRAFEEATNGEVERRVVSQLLTLMDGIKSRGQVVVIAATNRQNSIDPALRRFGRFDREIDIGVPDDNGRFEILRIHTKNMKLSPDVKLEELASNTHGFVGADLAQLCTEAALTCIREKMDVIDLEDEIIDKEVLESMCVTQDHFNMALGTCNPSSLRETVVEVPNVKWDDIGGLDEVKSTLREMILYPIDHPDKFEKFGMSPSRGVLFYGPPGCGKTLLAKAVASECSANFVSIKGPELLTMWFGESEANVREVFDKARAAAPCVLFFDELDSIGTQRGSSLGDGSGAGDRVMNQLLTEIDGVGPKKNLFFIGATNRPELLDEALLRPGRLDQLIYIPLPDLGARISILTAILRKCPVAENVPIDFLAQKTAGFSGADLAELCQRAARAAIRDAIDAEEMNKKSKLELSNKKENEQNETNENDVHNKTEQQANDQQKNDDDNIKYEITRHHFKEGLAGARRSVSQADLIKYDNFRIKFDPLYKTKTGGTGDDFIIDWPDEDNNDDTPAYVVDEDLYS

SEQ ID NO: 23132 - protein, 637 aa, Prochlorococcus marinus subsp. pastoris str. CCMP1378
MNQKLKTIILWALPIILVIALSYQFLSTSNIDSLKSNGTTIAPKNSAVARVSYGRFLDYINSGRVTSVDIFDGGRNAVIETIDSDLDNKVQRLRVDLPGLTPELITNLKNEGISFDVHPVKTTPPALGILGNLLFPAILIGGLILLARRSNGMPGGPGQAMQFGKSKARFAMDADTGVVFDDVAGVNEAKEDLEEVVTFLKKPEKFTSVGARIPKGVLLVGPPGTGKTLLAKAIAGEAGVPFFSLAGSEFVEMFVGVGASRVRDLFKKAKENSPCLIFIDEIDAVGRQRGAGIGGGNDEREQTLNQLLTEMDGFEGNSGIIIIAATNRPDVLDSALMRPGRFDRQVTVDAPDIKGRLSILEVHSKNKTLQEDLTLESIARRTPGFTGADLANLLNEAAILTARRRKESIGILEIDDSVDRIVAGMEGSPLTDGRSKRLIAYHEVGHAIIGTLVKAHDPVQKVTVIPRGQAKGLTWFTPDDDQSLISRANLKARIMGALGGRAAEDVVFGKGEITTGAGGDFQQVASMARQMVTRFGMSELGPIALEGGNQEVFVGRDLMTRSEVSDSISKQIDESVRVMVKDCYKETYSIISKNREAMDKIVDLLIEKETLDGEEFVKILSKFTQIPEKERTPQILN

SEQ ID NO: 23133 - protein, 415 aa, Encephalitozoon cuniculi
MNGQKQENIIEEKDVGFILSYGRNYYADGIVEKEAEIRRLFEQISLKLGTREVETGLAPPMCWDLLGDRNRIQSEPNLQVARVCKVLDGYQEPRYMIGIKMIAKFIVGKGKRVDSSLIQEGMRVGVDRNKYQIILPLPRKIDASVTLMQVEERPDVTYHDIGGCKEEIEKIREVVEAPLLNPERFVALGIDPPKGVLLYGPPGTGKTLLARAVANRTNACFIRVIGSELVQKYVGEGARMVREIFAMAKGKKACIIFFDEVDAFGGTRFDDDDDNEVQRTMLELINQLDGFDPRGNIKVLMATNRPDTLDPALLRPGRLDRKVEFGLPDLEGRTSILRIHAKTMSVDKDIRFDLIARLCNNATGAELRSVCTEAGMFAIRERRKIATEKDFLKAVDKVVKGYAKFSSTPRYLTYN

SEQ ID NO: 23134 - protein, 469 aa, Schistosoma japonicum
MAAYSLRPTSGGVVRKSGLGSGLFNFAQSPVRLIEKDKIGVRFSDVAGCEEAKLEIIEFVNFLRNPSKYEALGAKIPRGAILKGPPGTGKTLLAKATAGEANVPFLSVSGSEFLEMFVGVGPKRVRDMFASARDKAPCILFIDEIDAIGGKRSGTAFGHQERENTLNQLLVEMDGFTTQENVVVLAATNRIDILDPALLRPGRFDRQIYVSLPDIKGRASIFKIHLKPIKLADDTQLVARRMAARTPGFSGADIASVCNEAALIAAREDAHNVNLTHFDKAIDRVIAGLEKKSQVLQPEEKKTVAYHEAGHAVVGWFLEHCNPLLKVSIIPRGKALGYAQYQPRDIYLHTKDQMLDEMCLALGGRASEEVFFGKVGSGAVDDLQRVTRSAYSQIVQLGFSSKVGLLSFDLPQQGEMVLSKPYSEHTAQIIDEEVRQIVQSAYERTLALLTEKKQLVEKLALRLLDREQL

SEQ ID NO: 23135 - protein, 852 aa, Caenorhabditis elegans
MWRLYRKTPKQLRNSVESCFKSVNSRQFSVSSFSAVAKDDKSVLKQQEVLHLLAKDQRFEERFFNQVQQTIRYFASKPNDLKKFFRKEASTDNKESSSSSDKKDSKGNKGEDNNPFNQFPGGWQQIAVSVGILLALYAFMDYQSYREISWKEFYSDFLEAGLVERLEVVDKRWVRIVSSSGKYAGQTCYFNIGSVDSFERSLGAAQHHLQYDADRQIPVLYKSEFNFKREIPNLISVAFPLLFGYYIYRMLKGGGAAGGAGRAGGGGLGGMFGGFGQSTARVINREDIKVKFADVAGCEEAKIEIMEFVNFLKNPQQYKDLGAKIPKGAILTGPPGTGKTLLAKATAGEANVPFITVSGSEFLEMFVGVGPARVRDMFSMARKNSPCILFIDEIDAVGRKRGGKGGMGGHSEQENTLNQLLVEMDGFTTDESSVIVIAATNRVDILDSALLRPGRFDRQIYVPVPDIKGRASIFRVHLGPLRTSLDKTVLSRKLAAHTPGFSGADISNVCNEAALIAARDANHEISNKHFEQAIERVVAGMEKKTQVLQKEEKKTVAYHEAGHAIAGWFLQHADPLLKVSIIPRGKGLGYAQYLPKEQYLYSKDQLLDRMCMTLGGRVAEEIFFGRITTGAQDDLQKVTQMAYSQVVKFGMSEKVGPLSFETPAPGEMAFDKPYSEATAQLIDQEQFADLPEILDSGNLPICRKFSIPAICRFAGNFQFRQFANLPNCRKFSIPTICQFAGNFNFQKIADLPEKIVRDLVMNALRRTRDLLLEKRSDIERVALRLLEKEILNREDMIELVGKRPFVEKNTYEEMVSGTGGLDENVELPKGLENWNKESEKKKKDEEKKKNDE

SEQ ID NO: 23136 - protein, 628 aa, Nostoc punctiforme
MKFSWKVVVLWTLPALVIGFFFWQGAFAGAPTDMSKNAANTRMTYGRFLEYLDGDRVSSVDLYEGGRTAIIEARDPDIENRIQRWRVDLPVNAPELISKLKEKDISFDAHPMRNDGAIWGLLGNLVFPVLLITGLFFLFRRSSNLPGGPGQAMNFGKSKARFQMEAKTGVKFDDVAGIEEAKEELQEVVTFLKQPERFTAVGARIPKGVLLVGPPGTGKTLLAKAIAGEAGVPFFSISGSEFVEMFVGVGASRVRDLFKKAKDNAPCIIFIDEIDAVGRQRGAGIGGGNDEREQTLNQLLTEMDGFEGNTGIIIIAATNRPDVLDSALLRPGRFDRQVTVDAPDIKGRLEILEVHSRNKKLDPSVSLDAIARRTPGFTGADLANLLNEAAILTARRRKEAITLREIDDAVDRVVAGMEGTPLVDSKSKRLIAYHEIGHALVGTLLKDHDPVQKVTLIPRGQAQGLTWFTPNEEQGLISRSQLKARITGALGGRAAEEVIFGAAEVTTGAGGDLQQLSGMARQMVTRFGMSDLGPLSLESQQGEVFLGRDWTTRSEYSESIASRIDGQVRAIVEECYDNAKKIVRDHRTVTDRLVDLLIEKETIDGEEFRQIVAEYAEVPEKQQYVPQL

SEQ ID NO: 23137 - protein, 642 aa, Nostoc punctiforme
MTNLGKKALVKRQSSKRVAWFGAKALPAVGIAASLIMLPGIFGSTPVLAQKAESTSSSSSTSLNYGELIKKAKAGEVQKVELDETEQVARVYLKGQKENTPPQQVRLLAQNTELINILKDKNVEFGEISSANSRAAVGLLINLMWILPLLALMLLFLRRSTNASSQAMNFGKSKARFQMEAKTGVKFEDVAGVEEAKEDLEEVVTFLKQPERFTAVGARIPKGVLLIGPPGTGKTLLAKAIAGEAGVPFFSISGSEFVEMFVGVGASRVRDLFKKAKENAPCLIFIDEIDAVGRQRGAGIGGGNDEREQTLNQLLTEMDGFEGNTGIIIIAATNRPDVLDAALLRPGRFDRQVMVDAPDLKGRLEILKVHARNKKIDPSVSLEAIARRTPGFTGADLANLLNEAAILTARRRKEAVTILEIDAAVDRVVAGMEGTALVDSKSKRLIAYHEVGHALVGTLLKDHDPVQKVTLIPRGQALGLTWFTPNEEQGLVSRSQLKSRITATLGGRAAEEIVFGKPEVTTGASNDLQQVTGMARQMVTRFGMSELGPLSLENQSGEVFLGRDWMNKSDYSEEIAAKIDSQVREIVNNSYIKAKELLEENRIVLERLVDLLIEEETIEGDSFRQIVADNAQIADAQLAVPH

SEQ ID NO: 23138 - protein, 381 aa, Haemophilus influenzae Rd
MGRQRGAGLGGGHDEREQTLNQMLVEMDGFSGNDGVIVIAATNRPDVLDPALTRPGRFDRQVVVGLPDVKGREQILKVHMRKVSVAQDVDAMTLARGTPGYSGADLANLVNEAALFAARVNKRTVTMLEFEKAKDKINMGPERRTMIMTDKQKESTAYHEAGHAIVGYLVPEHDPVHKVTIIPRGRALGVTFFLPEGDQISISQKQLESKLSTLYAGRLAEDLIYGEENISTGASNDIKVATNIARNMVTQWGFSEKLGPILYTEDEGEVFLGRSMAKAKHMSDETAHSIDEEVRAIVNRNYARAREILIDNMDILHAMKDALVKYETIEEEQIKQLMNREPVTPPSGWGEPKTQQAAYANSTTNDTKPESAVENTDDFNV

SEQ ID NO: 23139 - protein, 703 aa, Plasmodium yoelii yoelii
MLLLRNIVVLDLKRSNFLYIKNIPDVKKLLNSKRYFSVLNTERLDRLKREIRYKPNDNFLILQFYKEANLHNPNEVIKHYENSSYIKNESTTKEYLKALVYTNKLKYTNLNNIKYDSEPNFYRRSMEDGNNNISGINNERSNIYETHNINIDPNYSNISRSGHTNNYNDKKNGTHSEVFSLQIDPKIPLKVSLINTNKKGLWGVLKSTIGFLILVAAASVYLEGVSQNVQKGIGVSNKKVVPVENVKVTLADVKGCDEVKQELQEIIDYLKNSDKFTKIGAKLPKGILLSGEPGTGKTLIARAIAGEANVPFIQASGSEFEEMFVGVGARRIRELFQTAKKHAPCIVFIDEIDAVGSKRSNRDNSAVRMTLNQLLVELDGFEQNEGIVVICATNFPQSLDKALVRPGRLDKTIVVPLPDINGRYEILKMYSNKIILSKDVDLNILARRTVGMTGADLKNILNIAAIKCSVEGKKSVDMNSIEQAFDRVVVGLQRKSPLSDEEKNITAYHEGGHTLVNFYTEGSDPVHKATIMPRGMSLGVTWKIPVTDKYSQKIKDIQSEIDVLMGGMVSEEIIFGKNNVTTGCSSDLQRATHIAQSLVMNYGVGINEENISMFLQDKKNISEDMKIKIDKSIQRILLDSYNRAKKVLNQHIDELHRVASALVEFETLTNDEIKLAMQGKNDQIRKNRELKQKEFNLKDNRVS

SEQ ID NO: 23140 - protein, 867 aa, Plasmodium yoelii yoelii
MYNYYKNFTSKIMNSNQYANDNYASSESDKHGEEDESALLSNGDRKYMNKSKSNQYDIDNGYYGYYDKIFGKRRNKKWNYFVIFFLGVCLGFAIWPFFMTIITYKLVYKDNYNNHNFPTSDNSNSLKPYVNDKNRKNDNPNNRTPPSEQGQKKPSPHFKPVKFDEIAGIDESKLELLEVVDFIKNRERYQEMGARMPKGVLLVGPPGSGKTMLARAVATEANVPYIYTSGPEFIEIYVGQGAKRIRQLFSHARSVAPSIVFIDEIDAIGGKRSPSASNGAGQKEHDQTLNQLLVEMDGFSNTVHIMVIGATNRIDTLDSALLRPGRFDRIVYVPLPDVSGRKKILEIYIKKIKSNLNANDIERMSRLTPGFSGADLENLVNEATILATRNKKSLVTINELFEARDKVSMGPERKSLKQSEHQRRITAYHEAGHAIVAYFLHPKTDPIHKATIISRGNALGYVEQIPVDDRHNYFKSQMEAKLAVCMGGRTAEEIVFGKSETSSGASSDISRATDIAYKMVTEWGMSDKLGPLNYKKRMGDGYSSMRLSAQTISAIETEVKTLVEKGKSISEEILRRHRKELDNLAFALLDKETLTGEEIKKIVDPNNSRDQSNRYQLLNKDPKNDDTQNDNNNSGKKPVRSDGKTNTSKNEKNEPNSHENEYNDSKEIDTNDKDNSNNMKSDEVNDLNKMENFVENEYIDTKDITTLSSENEIGILSKHFKNENKKLKKKYSRDPNTKNNNVLKMINSHKPSYYSKNENIDSENSINNSLDDFSDNIRNTRDSENNYDNNNTVKNTSELFTNDFSEENNNDNLSSVKTKDINYNNFQEIVDISPIKNVSEMKKQKTINFLYFYDFNNLKIIILFLQI

SEQ ID NO: 23141 - protein, 982 aa, Plasmodium yoelii yoelii
MYRSHIVEKNGQFLLKEKKYLKNILQSYRFEGFREKKNELFTINNDGKRCINSLVYTPNFNKISQNKNDGITITCDKKKYEQDIFSLNYFLDLIRNNKHLKNNSEFVKNVSNLFNRYAKLCCTHKMDYIQKNNEKVKHLKKSNETINKFLKKSFEAYNKINKIYDNNNNKIYDNNNDKIPDNNINSDVGHPNGLVNMKTEIDGKGKESNFVETLLKDIVKIYLSKIPKGFERFEKNNSNKNCNGNINNVQQEEEKPKKFDNNFFYLFILLLLCFLLFVDSNSLYNEITQNDFFYNYLSKGYVDKIKIINKDYVKAYLNSHGINKYHLKYVSFRVGNSDSFERKVELIQKEMNIKLDEIIEVQYVNEGNIIGEIKSYIPSILFFLFLIFIFQKITLKNVANSGMDKLFKFNKINPINKNNYKTDIKFSSVAGMKQAKEEIMEFVDFLKNPAKYQVLGAKIPKGALLCGAPGTGKTLLAKAVAGEANVPFFNISGSDFIEVFVGIGPSRVRELFAQARKHAPSIIFIDEIDAVGRKRSKGGFAGGGNDERENTLNQMLVEMDGFHTSNDQVVVLAGTNRIDILDPAITRPGRFDRIVNINKPDINERSEIFQVHLKNLKLHDSLDIKNISYILASLTPGFVGADIANVVNEGAIQCARRSHIQGVQIKDFELAIERVLGGLAKSTSLISPLEKKTISYHETGHALIGWFLEFADPVLKVSIIPRSNGALGYSQHLSEEIMLFSKEAIHDKIAVILGGRAAEELFIGKITTGAIDDLNKVTQLAYSYVSQYGMNKEIGLVSFQQNGGNNGSGEYAFYRPHSECLAHLIDNEARSLIESQYNRVKAILKKNEKHVHNLANLLYEKETISYHDIVKCVGERPYPIKSNYEKFVKANPYKMNLSTSMEEKSGEVDDPKNVRTQMGDSESAQKNAPQKGDNNNGSDSGNNNSGSDSGSNDKTGNDDSPITQNIGDRNKKDEKISNFNIR

SEQ ID NO: 23142 - protein, 638 aa, Prochlorococcus marinus str. MIT 9313
MNQRWRLIALWLLPIGVALLLAWQILGNGKLTGEQPSNATLAPRNAAVTRMSYGRFLDYVEAGRVTAVDIYDGGRNAVVEAVDPELDNRVQRLRVDLPGLAPELINTLKSEGISFDIHPARTTPPALGLLGNLLFPLLLIGGLILLARRSSSMPGGPGQAMQFGKTKARFAMEAETGVKFDDVAGVTEAKQDLEEVVTFLKKPERFTSVGAQIPRGVLLVGPPGTGKTLLAKAIAGEAGVPFFSLSGSEFVEMFVGVGASRVRDLFKRAKENTPCLIFIDEIDAVGRQRGAGIGGGNDEREQTLNQLLTEMDGFEGNSGIIIIAATNRPDVLDSALMRPGRFDRQVSVDAPDIKGRLAILEVHARDKKLEEDLSLKNVARRTPGFTGADLANLLNEAAILTARRRKKAISLDEIDDAVDRIIAGMEGHPLTDGRSKRLIAYHEVGHALIGTLVKDHDPVQKVTLIPRGQAQGLTWFAPDEEQMLVTRAQLKARIMGALGGRAAEDVVFGDAEITTGAGGDIQQVASMARQMVTRFGMSDLGPVSLESGNQEVFIGRDLMTRSEISDAISRQIDEAVREMVKHCYSETVKIVKQHREAMDRLVEILIEKETIDGEEFVSVVAEFTSVPEKERSIPILQS

SEQ ID NO: 23143 - protein, 637 aa, SYNECHOCOCCUS SP. WH 8102
MNQRWRLVALWLLPIGVVLLIGWQVISNGGLNSQNAGGTTVAPRNAAVARMSYGRFLDYVEAGRVTAVDIYDGGRNAVIEAVDPDLDNRVQRLRVDLPGLAPELVNTLKEEGISFDIHPPRTAPPALGLLGNLLFPLLLIGSLIFLARRNSGMPGGPGQAMQFGKSKARFMMEAETGVMFDDVAGVAEAKQELQEVVTFLKQPERFTSVGAQIPRGLLLVGPPGTGKTLLAKAIAGEAGVPFFSLSGSEFVEMFVGVGASRVRDLFKKAKENSPCLIFIDEIDAVGRQRGAGIGGGNDEREQTLNQLLTEMDGFEGNSGIIIIAATNRPDVLDSALMRPGRFDRQVTVDAPDIKGRLSILEVHCRNKKLEEELSLESIARRTPGFTGADLANLMNEAAILTARRRKEAIGLSEIDDAVDRIIAGMEGRPLTDGRSKRLIAYHEVGHALIGTLVKDHDPVQKVTLIPRGQAQGLTWFSPDEEQTLVTRSQLKARIMGALGGRAAEDVVFGHEEVTTGAGGDIQQVASMARQMVTRLGMSDLGPVALEGGGQEVFLGRDLMSRNDISESISQQIDAQVRQMVKRCYEETVDIVAANREAMDRLVELLIEKETMDGGEFAAVVAEFTQVPAKDRTVVTLD

SEQ ID NO: 23144 - protein, 657 aa, Bacillus halodurans
MNRIFRNTIFYLLIFLVIVGIVSFFTGDQTQTKQITFEEFTQHLEAGEITSLSIKPERDVYLVRGQLRGADEDEFFETYVLPTEQMAETISEAAGLQVIPADETSGWVTFFTGIIPFIIIFILFFFLLSQAQGGGSRVMNFGKSKAKMVNEDKKKAKFKDVAGADEEKQELVEVVEFLKDPRKFSAIGARIPKGVLLVGPPGTGKTLLARAVAGEAGVPFFSISGSDFVEMFVGVGASRVRDLFENAKKNAPCIIFIDEIDAVGRQRGAGLGGGHDEREQTLNQLLVEMDGFSANEGIIIIAATNRADILDPALLRPGRFDRQITVGRPDVKGREEVLKVHASNKPLADDVNLKTIATRTPGFSGADLENLLNEAALVAARQDEKKISMVHIEEAIDRVIAGPAKKSRVISEKEKNIVAWHEAGHTVVGVKLENADMVHKVTIVPRGVAGGYAVMLPKEDRYFMTKPELLDKIVGLLGGRVAEEIQFGEASTGAHNDFQRATSIARKMVTEYGMSEKLGPMQFGSGSGGQVFLGRDIQNEQNYSDAIAHEIDLEVQRIIKECYERCKQILLDNKKSLDLVAETLLDLETLDAEQIKSLIHDGKLPDNHHLAEKIAETRENGQDSEVKVNIHSKKGEEAEGEESAPNTEDVKEDDEKK

SEQ ID NO: 23145 - protein, 797 aa, Homo sapiens
MAHRCLRLWGRGGCWPRGLQQLLVPGGVGPGEQPCLRTLYRFVTTQARASRNSLLTDIIAAYQRFCSRPPKGFGKYFPNGKNGKKASEPKEVMGEKKESKPAATTRSSGGGGGGGGKRGGKKDDSHWWSRFQKGDIPWDDKDFRMFFLWTALFWGGVMFYLLLKRSGREITWKDFVNNYLSKGVVDRLEVVNKRFVRVTFTPGKTPVDGQYVWFNIGSVDTFERNLETLQQELGIEGENRVPVVYIAESDGSFLLSMLPTVLIIAFLLYTIRRGPAGIGRTGRGMGGLFSVGETTAKVLKDEIDVKFKDVAGCEEAKLEIMEFVNFLKNPKQYQDLGAKIPKGAILTGPPGTGKTLLAKATAGEANVPFITVSGSEFLEMFVGVGPARVRDLFALARKNAPCILFIDEIDAVGRKRGRGNFGGQSEQENTLNQLLVEMDGFNTTTNVVILAGTNRPDILDPALLRPGRFDRQIFIGPPDIKGRASIFKVHLRPLKLDSTLEKDKLARKLASLTPGFSGADVANVCNEAALIAARHLSDSINQKHFEQAIERVIGGLEKKTQVLQPEEKKTVAYHEAGHAVAGWYLEHADPLLKVSIIPRGKGLGYAQYLPKEQYLYTKEQLLDRMCMTLGGRASEEIFFGRITTGAQDDLRKVTQSAYAQIVQFGMNEKVGQISFDLPRQGDMVLEKPYSEATARLIDDEVRILINDAYKRTVALLTEKKADVEKVALLLLEKEVLDKNDMVELLGPRPFAEKSTYEEFVEGTGSLDEDTSLPEGLKDWNKEREKEKEEPPGEKVAN

SEQ ID NO: 23146 - protein, 812 aa, Homo sapiens
GAGGRRRRVESLGSSVSRRRASLPGGLSPSRARFPRPPVVACPRLREQPCLRTLYRFVTTQARASRNSLLTDIIAAYQRFCSRPPKGFEKYFPNGKNGKKASEPKEVMGEKKESKPAATTRSSGGGGGGGGKRGGKKDDSHWWSRFQKGDIPWDDKDFRMFFLWTALFWGGVMFYLLLKRSGREITWKDFVNNYLSKGVVDRLEVVNKRFVRVTFTPGKTPVDGQYVWFNIGSVDTFERNLETLQQELGIEGENRVPVVYIAESDGSFLLSMLPTVLIIAFLLYTIRRGPAGIGRTGRGMGGLFSVGETTAKVLKDEIDVKFKDVAGCEEAKLEIMEFVNFLKNPKQYQDLGAKIPKGAILTGPPGTGKTLLAKATAGEANVPFITVSGSEFLEMFVGVGPARVRDLFALARKNAPCILFIDEIDAVGRKRGRGNFGGQSEQENTLNQLLVEMDGFNTTTNVVILAGTNRPDILDPALLRPGRFDRQIFIGPPDIKGRASIFKVHLRPLKLDSTLEKDKLARKLASLTPGFSGADVANVCNEAALIAARHLSDSINQKHFEQAIERVIGGLEKKTQVLQPEEKKTVAYHEAGHAVAGWYLEHADPLLKVSIIPRGKGLGYAQYLPKEQYLYTKEQLLDRMCMTLGGRVSEEIFFGRITTGAQDDLRKVTQSAYAQIVQFGMNEKVGQISFDLPRQGDMVLEKPYSEATARLIDDEVRILINDAYKRTVALLTEKKADVEKVALLLLEKEVLDKNDMVELLGPRPFAEKSTYEEFVEGTGSLDEDTSLPEGLKDWNKEREKEKEEPPGEKVAN

SEQ ID NO: 23147 - protein, 806 aa, Mus musculus
MASGADSKGDDLSTAILKQKNRPNRLIVDEAINEDNSVVSLSQPKMDELQLFRGDTVLLKGKKRREAVCIVLSDDTCSDEKIRMNRVVRNNLRVRLGDVISIQPCPDVKYGKRIHVLPIDDTVEGITGNLFEVYLKPYFLEAYRPIRKGDIFLVRGGMRAVEFKVVETDPSPYCIVAPDTVIHCEGEPIKREDEEESLNEVGYDDVGGCRKQLAQIKEMVELPLRHPALFKAIGVKPPRGILLYGPPGTGKTLIARAVANETGAFFFLINGPEIMSKLAGESESNLRKAFEEAEKNAPAIIFIDELDAIAPKREKTHGEVERRIVSQLLTLMDGLKQRAHVIVMAATNRPNSIDPALRRFGRFDREVDIGIPDATGRLEILQIHTKNMKLADDVDLEQVANETHGHVGADLAALCSEAALQAIRKKMDLIDLEDETIDAEVMNSLAVTMDDFRWALSQSNPSALRETVVEVPQVTWEDIGGLEDVKRELQELVQYPVEHPDKFLKFGMTPSKGVLFYGPPGCGKTLLAKAIANECQANFISIKGPELLTMWFGESEANVREIFDKARQAAPCVLFFDELDSIAKARGGNIGDGGGAADRVINQILTEMDGMSTKKNVFIIGATNRPDIIDPAILRPGRLDQLIYIPLPDEKSRVAILKANLRKSPVAKDVDLEFLAKMTNGFSGADLTEICQRACKLAIRESIESEIRRERERQTNPSAMEVEEDDPVPEIRRDHFEEAMRFARRSVSDNDIRKYEMFAQTLQQSRGFGSFRFPSGNQGGAGPSQGSGGGTGGSVYTEDNDDDLYG

SEQ ID NO: 23148 - protein, 806 aa, Mus musculus
MASGADSKGDDLSTAILKQKNRPNRLIVDEAINEDNSVVSLSQPKMDELQLFRGDTVLLKGKKRREAVCIVLYDDTCSDEKIRMNRVVRNNLRVRLGDVISIQPCPDVKYGKRIHVLPIDDTVEGITGNLFEVYLKPYFLEAYRPIRKGDIFLVRGGMRAVEFKVVETDPSPYCIVAPDTVIHCEGEPIKREDEEESLNEVGYDDIGGCRKQLAQIKEMVELPLRHPALFKAIGVKPPRGILLYGPPGTGKTLIARAVANETGAFFFLINGPEIMSKLAGESESNLRKAFEEAEKNAPAIIFIDELDAIAPKREKTHGEVERRIVSQLLTLMDGLKQRAHVIVMAATNRPNSIDPALRQFGRFDREVDIGIPDATGRLEILQIHTKNMKLADDVDLEQVANETHGHVGADLAALCSEAALQAIRKKMDLIDLEDETIDAEVMNSLAVTMDDFRWALSQSNPSALRETVVEVPQVTWEDIGGLEDVKRELQELVQYPVEHPDKFLKFGMTPSKGVLFYGPPGCGKTLLAKAIANECQANFISIKGPELLTMWFGESEANVREIFDKARQAAPCVLFFDELDSIAKARGGNIGDGGGAADRVINQILTEMDGMSTKKNVFIIGATNRPDIIDPAILRPGRLDQLIYIPLPDEKSRVAILKANLRKSPVAKDVDLEFLAKMTNGFSGADLTEICQRACKLAIRESIESEIRRERERQTNPSAMEVEEDDPVPEIRRDHFEEAMRFARRSVSDNDIRKYEMFAQTLQQSRGFGSFRFPSGNQGGAGPSQGSGGGTGGSVYTEDNDDDLYG

SEQ ID NO: 23149 - protein, 806 aa, Mus musculus
MASGADSKGDDLSTAILKQKNRPNRLIVDEAINEDNSVVSLSQPKMDELQLFRGDTVLLKGKKRREAVCIVLSDDTCSDEKIRMNRVVRNNLRVRLGDVISIQPCPDVKYGKRIHVLPIDDTVEGITGNLFEVYLKPYFLEAYRPIRKGDIFLVRGGMRAVEFKVVETDPSPYCIVAPDTVIHCEGEPIKREDEEESLNEVGYDDIGGCRKQLAQIKEMVELPLRHPALFKAIGVKPPRGILLYGPPGTGKTLIARAVANETGAFFFLINGPEIMSKLAGESESNLRKAFEEAEKNAPAIIFIDELDAIAPKREKTHGEVERRIVSQLLTLMDGLKQRAHVIVMAATNRPNSIDPALRRFGRFDREVDIGIPDATGRLEILQIHTKNMKLADDVDLEQVANETHGHVGADLAALCSEAALQAIRKKMDLIDLEDETIDAEVMNSLAVTMDDFRWALSQSNPSALRETVVEVPQVTWEDIGGLEDVKRELQELVQYPVEHPDKFLKFGMTPSKGVLFYGPPGCGKTLLAKAIANECQANFISIKGPELLTMWFGESEANVREIFDKARQAAPCVLFFDELDSIAKARGGNIGDGGGAADRVINQILTEMDGMSTKKNVFIIGATNRPDIIDPAILRPGRLDQLIYIPLPDEKSRVAILKANLRKSPVAKDVDLEFLAKMTNGFSVADLTEICQRACKLAIRESIESEIRRERERQTNPSAMEVEEDDPVPEIRRDHFEEAMRFARRSVSDNDIRKYEMFAQTLQQSRGFGSFRFPSGNQGGAGPSQGSGGGTGGSVYTEDNDDDLYG

SEQ ID NO: 23150 - protein, 801 aa, Mus musculus
MASGADSKGDDLSTAILKQKNRPNRLIVDEAINEDNSVVSLSQPKMDELQLFRGDTVLLKGKKRREAVCIVLSDDTCSDEKIRMNRVVRNNLRVRLGDVISIQPCPDVKYGKRIHVLPIDDTVEGITGNLFEVYLKPYFLEAYRPIRKGDIFLVRGGMRAVEFKVVETDPSPYCIVAPDTVIHCEGEPIKREDEEESLNEVGYDDIGGCRKQLAQIKEMVELPLRHPALFKAIGVKPPRGILLYGPPGTGKTLIARAVANETGAFFFLINGPEIMSKLAGESESNLRKAFEEAEKNAPAIIFIDELDAIAPKREKTHGEVERRIVSQLLTLMDGLKQRAHVIVMAATNRPNSIDPALRRFGRFDREVDIGIPDATGRLEILQIHTKNMKLADDVDLEQVANETHGHVGADLAALCSEAALQAIRKKMDLIDLEDETIDAEVMNSLAVTMDDFRWALSQSNPSALRETVVEVPQVTWEDIGGLEDVKRELQELVQYPVEHPDKFLKFGMTPSKGVLFYGPPGCGKTLLAKAIANECQANFISIKGPELLTMWFGESEANVREIFDKARVLFFDELDSIAKARGGNIGDGGGAADRVINQILTEMDGMSTKKNVFIIGATNRPDIIDPAILRPGRLDQLIYIPLPDEKSRVAILKANLRKSPVAKDVDLEFLAKMTNGFSGADLTEICQRACKLAIRESIESEIRRERERQTNPSAMEVEEDDPVPEIRRDHFEEAMRFARRSVSDNDIRKYEMFAQTLQQSRGFGSFRFPSGNQGGAGPSQGSGGGTGGSVYTEDNDDDLYG

SEQ ID NO: 23151 - protein, 723 aa, Mus musculus
MNRVVRNNLRVRLGDVISIQPCPDVKYGKRIHVLPIDDTVEGITGNLFEVYLKPYFLEAYRPIRKGDIFLVRGGMRAVEFKVVETDPSPYCIVAPDTVIHCEGEPIKREDEEESLNEVGYDDIGGCRKQLAQIKEMVELPLRHPALFKAIGVKPPRGILLYGPPGTGKTLIARAVANETGAFFFLINGPEIMSKLAGESESNLRKAFEEAEKNAPAIIFIDELDAIAPKREKTHGEVERRIVSQLLTLMDGLKQRAHVIVMAATNRPNSIDPALRRFGRFDREVDIGIPDATGRLEILQIHTKNMKLADDVDLEQVANETHGHVGADLAALCSEAALQAIRKKMDLIDLEDETIDAEVMNSLAVTMDDFRWALSQSNPSALRETVVEVPQVTWEDIGGLEDVKRELQELVQYPVEHPDKFLKFGMTPSKGVLFYGPPGCGKTLLAKAIANECQANFISIKGPELLTMWFGESEANVREIFDKARQAAPCVLFFDELDSIAKARGGNIGDGGGAADRVINQILTEMDGMSTKKNVFIIGATNRPDIIDPAILRPGRLDQLIYIPLPDEKSRVAILKANLRKSPVAKDVDLEFLAKMTNGFSGADLTEICQRACKLAIRESIESEIRRERERQTNPSAMEVEEDDPVPEIRRDHFEEAMRFARRSVSDNDIRKYEMFAQTLQQSRGFGSFRFPSGNQGGAGPSQGSGGGTGGSVYTEDNDDDLYG

SEQ ID NO: 23152 - protein, 458 aa, Mus musculus
MASGADSKGDDLSTAILKQKNRPNRLIVDEAINEDNSVVSLSQPKMDELQLFRGDTVLLKGKKRREAVCIVLSDDTCSDEKIRMNRVVRNNLRVRLGDVISIQPCPDVKYGKRIHVLPIDDTVEGITGNLFEVYLKPYFLEAYRPIRKGDIFLVRGGMRAVEFKVVETDPSPYCIVAPDTVIHCEGEPIKREDEEESLNEVGYDDVGGCRKQLAQIKEMVELPLRHPALFKAIGVKPPRGILLYGPPGTGKTLIARAVANETGAFFFLINGPEIMSKLAGESESNLRKAFEEAEKNAPAIIFIDELDAIAPKREKTHGEVERRIVSQLLTLMDGLKQRAHVIVMAATNRPNSIDPALRRFGRFDREVDIGIPDATGRLEILQIHTKNMKLADDVDLEQVANETHGHVGADLAALCSEAALQAIRKKMDLIDLEDETIDAEVMNSLAVTMDDFRWALSQ

SEQ ID NO: 23153 - protein, 892 aa, Mus musculus
MSSKKNRKRQKEGAEGASPSLSAAPSRSGTSTPFAQPSPAAPGMLVVTNFLEKDGKVPKTFQNSLVHLGLNTMKSANICIGRPVLLTSLDGKQEVYTAWPVAGFPGGKVGLSEMAQKNVGVRAGETIQVQPLLGAVLQAQEMDLALSDKDKEINEEELTGCILRKLDGKIVLPGNFLYCTFYGRLCKLQVLQVKGTDGTTLGKPQSASGTDAQGMASEHSSMENSDVDLSFQLSQLDLKEPQSPSSQSTPCKPTNDRTVNKAGEVLLDVTQSPRDGSGLGLEESTGLKCSFDSSKEGNTQPVSEEKLLKPASAGTKSNTDTFYFISSTTRINLRKICTNSKEQDSQFKVTYDMIGGLNSQLKAIREIIELPLKQPELFKSYGIPAPRGLLLYGPPGTGKTMIARAVANEVGAYVSVINGPEIISKFYGETEARLRQIFAEATLRHPSIIFIDELDALCPKREGAQSEVEKRVVASLLTLMDGIGSEGSEGRVLVLGATNRPQALDAALRRPGRFDKEIEIGIPNAQDRLDILQKLLRRVPHLLTKAELLRLANNAHGYVGADLKALCNEAGLHALRRVLRKQPNLPDSKVAGMVKITLNDFLQGMNDIRPSAMREVAIDVPNVSWSDIGGLENIKLKLKQAVEWPLKHPKSFNRMGIQPPKGVLLYGPPGCSKTMIAKALANESGLNFLAIKGPELMNKYVGESERAVREIFRKARAVAPSIIFFDELDALAVERGSSSGAGNVADRVLAQLLTEMDGIEQLKNVTVLAATNRPDRIDKALMRPGRIDRIIYVPLPDAATRREILNLQFHSMPISNEVDLDELVLQTDTYSGAEIIAVCKEAALLALEENIKADCIMKRHFTEALSIVTPRIPESLRRFYEDYQEKSGLHTV

SEQ ID NO: 23154 - protein, 893 aa, Mus musculus
MSSKKNRKRQKEGAEGASPSLSAAPSRSGTSTPFAQPSPAAPGMLVVTNFLEKVDGKVPKTFQNSLVHLGLNTMKSANICIGRPVLLTSLDGKQEVYTAWPVAGFPGGKVGLSEMAQKNVGVRAGETIQVQPLLGAVLQAQEMDLALSDKDKEINEEELTGCILRKLDGKIVLPGNFLYCTFYGRLCKLQVLQVKGTDGTTLGKLQSASGTDAQGMASEHSSMESSDVDLSFQLSQLDLKEPQSPSSQSTPCKPTNDRTVNKAGEVLLDVTQSPRDGSGLGLEESTGLKCSFDSSKEGNTQPVSEEKLLKPASAGTKSNTDTFYFISSTTRINLRKICTNSKEQDSQFKVTYDMIGGLNSQLKAIREIIELPLKQPELFKSYGIPAPRGLLLYGPPGTGKTMIARAVANEVGAYVSVINGPEIISKFYGETEARLRQIFAEATLRHPSIIFIDELDALCPKREGAQSEVEKRVVASLLTLMDGIGSEGSEGRVLVLGATNRPQALDAALRRPGRFDKEIEIGIPNAQDRLDILQKLLRRVPHLLTKAELLRLANNAHGYVGADLKALCNEAGLHALRRVLRKQPNLPDSKVAGMVKITLNDFLQGMNDIRPSAMREVAIDVPNVSWSDIGGLENIKLKLKQAVEWPLKHPKSFNRMGIQPPKGVLLYGPPGCSKTMIAKALANESGLNFLAIKGPELMNKYVGESERAVREIFRKARAVAPSIIFFDELDALAVERGSSSGAGNVADRVLAQLLTEMDGIEQLKNVTVLAATNRPDRIDKALMRPGRIDRIIYVPLPDAATRREILNLQFHSMPISNEVDLDELVLQTDTYSGAEIIAVCKEAALLALEENIKADCIMKRHFTQALSIVTPRIPESLRRFYEDYQEKSGLHTV

SEQ ID NO: 23155 - protein, 806 aa, Rattus norvegicus
MASGADSKGDDLSTAILKQKNRPNRLIVDEAINEDNSVVSLSQPKMDELQLFRGDTVLLKGKKRREAVCIVLSDDTCSDEKIRMNRVVRNNLRVRLGDVISIQPCPDVKYGKRIHVLPIDDTVEGITGNLFEVYLKPYFLEAYRPIRKGDIFLVRGGMRAVEFKVVETDPSPYCIVAPDTVIHCEGEPIKREDEEESLNEVGYDDIGGCRKQLAQIKEMVELPLRHPALFKAIGVKPPRGILLYGPPGTGKTLIARAVANETGAFFFLINGPEIMSKLAGESESNLRKAFEEAEKNAPAIIFIDELDAIAPKREKTHGEVERRIVSQLLTLMDGLKQRAHVIVMAATNRPNSIDPALRRFGRFDREVDIGIPDATGRLEILQIHTKNMKLADDVDLEQVANETHGHVGADLAALCSEAALQAIRKKMDLIDLEDETIDAEVMNSLAVTMDDFRWALSQSNPSALRETVVEVPQVTWEDIGGLEDVKRELQELVQYPVEHPDKFLKFGMTPSKGVLFYGPPGCGKTLLAKAIANECQANFISIKGPELLTMWFGESEANVREIFDKARQAAPCVLFFDELDSIAKARGGNIGDGGGAADRVINQILTEMDGMSTKKNVFIIGATNRPDIIDPAILRPGRLDQLIYIPLPDEKSRVAILKANLRKSPVAKDVDLEFLAKMTNGFSGADLTEICQRACKLAIRESIESEIRRERERQTNPSAMEVEEDDPVPEIRRDHFEEAMRFARRSVSDNDIRKYEMFAQTLQQSRGFGSFRFPSGNQGGAGPSQGSGGGTGGNVYTEDNDDDLYG

SEQ ID NO: 23156 - protein, 978 aa, Rattus norvegicus
MALAVLHVLEPFPTETPPLAVLLPPGGPWPVTGVGLVLALRPASESPAGPALLVAAVEGSGAQCEQRGPGPPPLLVSRTLLRVLALSPGARVRARPVRRPPALGWALLGTSPGPGLGPRVGPLLVRRGETLPVPGSRVLETRPALQGLLGPGTRLAVTELQGRTKLDPESRDHNHPPPPPVVSSFAVSHSIRQLRGVLGGTGDALGVSRSCLRSLGLFQGEWVWVARVGELPNTSQPHLAQVQVLEPRWDLSARLGPNSGQPGEPLADGLVFVPATLAFNLGCDPLEVGELRIQRYLEDSTAAEDKGSCSLLPGPPFARELHIEVLPSPHCGVNGKYDHVLYQHFHTPRVVQEGDVLCVSTAGQVEILEGSLERLPRWREVFFKVKKTVGEAPDGPASAFLADTTHTSLYLAGTTLSRVPPLPSGRSPPWDSLSPPGLEALVNELCAVLKPHLQPGGTLLTGTSCVLLQGPPGSGKTTAVTAACSRLGLHLLKVPCSSLCADSSRTVETKLQTTFSRARRCRPVVLLLTALDLLGRDRDGLGEDARVVATLRHLLLDEDPLSRCPPLMVVATTSRVQDLPTDVRTAFPHELEVPVLSESQRLSVLQALTAHLPLGQEVNLSQLARRCAGFVVGDLYALLTHASRAACTRIKAAGLAMSEEDEGELCAAGFPLLAEDFGQALDQLQTAHSQAVGAPKIPSVSWHDVGGLQDVKKEILETIQLPLEHPELLSLGLRRSGLLLHGPPGTGKTLLAKAVATECSLTFLSVKGPELINMYVGQSEENVREVFARARAAAPCIIFFDELDSLAPSRGRSGDSGGVMDRVVSQLLAELDGLHSTQDVFVIGATNRPDLLDPALLRPGRFDKLVFVGASEDRASQLRVLSAITRKFKLEASVSLMNVLDCCPPQLTGADLYSLCSDAMMTALKRRVRDLEEGLEPRSSALLLTMEDLLQAAARLQPSVSEQELLRYKRIQRKFAAC

SEQ ID NO: 23157 - protein, 978 aa, Rattus norvegicus
MALAVLHVLEPFPTETPPLAVLLPPGGPWPVTGVGLVLALRPASESPAGPALLVAAVEGSGAQCEQRGPGPPPLLVSRTLLRVLALSPGARVRARPVRRPPALGWALLGTSPGPGLGPRVGPLLVRRGETLPVPGSRVLETRPALQGLLGPGTRLAVTELQGRTKLDPESRDHNHPPPPPVVSSFAVSHSIRQLRGVLGGTGDALGVSRSCLRSLGLFQGEWVWVARVGELPNTSQPHLAQVQVLEPRWDLSARLGPNSGQPGEPLADGLVFVPATLAFNLGCDPLEVGELRIQRYLEGSTAAEDKGSCSLLPGPPFARELHIEVLPSPHCGANGKYDHVLYRHFHTPRVVQEGDVLCVSTAGQVEILEGSLERLPRWREVFFKVKKTVGEAPDGPASAFLADTTHTSLYLAGTTLSRVPPLPSGRSPPWDSLSPPGLEALVNELCAVLKPHLQPGGTLLTGTSCVLLQGPPGSGKTTAVTAACSRLGLHLLKVPCSSLCADSSRTVETKLQTTFSRARRCRPVVLLLTALDLLGRDRDGLGEDACVVATLRHLLLDEDPLSRCPPLMVVATTSRVQDLPTDVRTAFPHELEVPVLSESQRLSVLQALTAHLPLGQEVNLSQLARRCAGFVVGDLYALLTHASRAACTRIKAAGLAMSEEDEGELCAAGFPLLAEDFGQALDQLQTAHSQAVGAPKIPSVSWHDVGGLQDVKKEILETIQLPLEHPELLSLGLRRSGLLLHGPPGTGKTLLAKAVATECSLTFLSVKGPELINMYVGQSEENVREVFARARAAAPCIIFFDELDSLAPSRGRSGDSGGVMDRVVSQLLAELDGLHSTQDVFVIGATNRPDLLDPALLRPGRFDKLVFVGASEDRASQLRVLSAITRKFKLEASVSLMNVLDCCPPQLTGADLYSLCSDAMMTALKRRVRDLEEGLEPRSSALLLTMEDLLQAAARLQPSVSEQELLRYKRIQRKFAAC

SEQ ID NO: 23158 - protein, 613 aa, Nostoc sp. PCC 7120
MSDLFKGFEQLIELVKTLEEKAEKGEIKTDFQINSRSMSSIPRTGNIPRPNNMANDIGTSRIRTQPSPNSDSGNGDSSDVVVPPDAPSGNSLKDVGGLGEVVKELKELIAIPLKRPDLLAKLGLEPTRGVLLVGPPGTGKTLTARGLAEELGVNYIALVGPEVISKYYGEAEQRLRGIFEKAAKNAPCIIFIDEIDSLAPDRSAVEGEVEKRLVAQLLSLMDGFSHSQGVIVLAATNRPDHLDPALRRPGRFDREVQFRVPDVKGRRDILQILTRAMPLEETVDLDAIAERSVGFVGADLKALCQKAAYTALRRQMPSVESAVPENMTVSQADFLQALKEIKPAVLRSVEVEVPHIAWDDIGGLDTIKQTLRESVEGALLYPELYLQTKALAPKGILLWGPPGTGKTLLAKAVASQARANFIGVNGPELLSRWVGASEQAVRELFAKARQAEPCVVFIDEIDTLAPARGSFSGDSGVSDRVVGQLLTELDGIEVGSTILVIGATNRPDALDPALLRAGRLDLQMKVDLPDLASRLAILLVHSQGRPLDGVDFNYWAEMTQDWNGADLTLLCNQAAVEAIRRFRSQGLTDPSEIKITTDDFNYAYKVLTEQRPD

SEQ ID NO: 23159 - protein, 663 aa, Rhodopseudomonas palustris
MSPRRSRGCSSVPKVAVARLVRLARLADGGAKFGAAVGDGWWAGLCRSLPRLGRSAPDDDGNPPRRSFDNHRVARGDRVEIGSKGQRRCYMVVDVIPDGSGVIDRATEVTIDHRAMADATTSPYDDVGGLAREVALVREMVELPLRFPHVFARLGIEAPKGVLLYGPPGCGKTLIARTVAREAGVYFLHVNGPEIIQKHYGESEEMLRRIFADAQKQPAAIIFFDEIDAIAPNRETVLGDVEKRVVAQLLALMDGLTARGNIVVIAATNLPNSLDPALRRPGRFDREIGIAPPDRAGRLEILRIHTRRMPLADDVDLAQIAAAAHGYLGADLAALCREAAMGCTRDLGPRLVAGDPGAAAALDGDLQVRMDHFRRALREVPLASTRSLTTEVAASHWDEVGGLDDIKALLRETVEWPLKYPQRLAFAKTTAPRGILLTGPTGTGKTLIVRALATQSDVNFIAVNGPELLSKWVGETERAIRDVFRKARQSAPSIIFFDEVDAIVASRGGDDGGARIGDRMVGQFLLEMDGLAGLDGVVVIAATNRPDLIDRALLRPGRFDHIATLALPDRAARAAILAIHCRGRALGSDVDLAALAKACAGMSGADLEALCRRAAMAAIRASIIAEPGADFAPFAITGGDFDAALADWRTATPEGASKLDAVA

SEQ ID NO: 23160 - protein, 689 aa, Sulfolobus tokodaii
MDGITRKNAGVSIGDKVIVRKASPKIATSVKLAPSNFSITVDPGFISYVKKKLKDYPLVEGDTVLIPVLGQAIPFTVVQVRPQGIVIVSDETSITISEKPAEQARYPRVTYEDIGGMKHIIQKIRELVELPLKHPELFKRLGIEPPKGILLYGPPGVGKTLLAKAVANETEAYFTSINGPEIMSKFYGESEQRLREIFEDAKKHAPAIIFIDEIDAIAPKRDEVIGEVERRVVAQLLTLMDGLESRGNVIVIAATNRPNAVDPALRRPGRFDREIEIPLPDKQGRLEILQIHTRNMPLSKDVDLEKLAEMTHGYTGADLSALVREAAMNALRRYLQVIDLNQDKIPPEILEKMEVNMDDFLKAFKEIVPSGLREIYVEVPEVHWSDIGGLEDVKEELREVVEYPLKYREAYENVGIEPPKGILLFGPPGTGKTMLAKAVATESGANFIAVRGPEILSKWVGESEKAIREIFRKARQAAPTVIFFDEIDAIAPMRGLTTDSGVTERIVNQLLAEMDGIEKLENVVIIAATNRPDILDPALLRPGRFDRLIYVPPPDKRARAEILKVHTRNVPLAEDITLDELAEKTEGYTGADLAALVREATLRAIREEMTECMKKADENCKRNDNECRDKIVKDCMKGKGVLVEKRHFDIALKKVRPSVTMDMIQFYQNWLEKARQQLPRANLKPSTFT

SEQ ID NO: 23161 - protein, 747 aa, Sulfolobus tokodaii
MSQEVSLRVSEARQRDVGKKIARLSDYTMRKLGIETGDYIEIIGPNGSALAQAMPSYDISDDEIKIDGYIRKSIGVGIGDDVKVKKANVTPATKITLAPTQPIRFDRSFVEYVKDQLMNKPLAKGETIPVPIYTGTLDFIVINTQPSNYVYVTESTNLEIREEPAKESELGGYPKVTWEDIGDLEEAKQKIREIVEWPLRHPELFQRLGIEPPKGILLYGPPGNGKTLLARALANEVGASFYTINGPEIMSKFYGESEQRLREIFEEAQKNAPAIIFIDEIDSIAPKREEVTGEVEKRVVAQLLTLMDGIKGRGKVIVIGATNRPDAVDPALRRPGRFDREIEIRPPDTKGRKEILQVHTRNMPLAEDVDLDKLAEITYGYTGADLAALAKEAAMNALRRFIAEKKINLEQERIPAEILKELKVTMQDFLEAMKSIQPTLLREVYVEVPKVHWNDIGGLEEVKQQLREAVEWPLRFSELFNKSGITPPKGILLFGPPGTGKTMLAKAVATESGANFIAVRGPEILSKWVGESEKAIREIFRKARQAAPTIIFFDEIDAIAPMRGLTTDSGVTERIVNQLLAEMDGIVPLNKVVVIAATNRPDILDPALLRPGRFDRLIYVPPPDKRARAEILKVHTRNVPLAEDITLDELAEKTEGYTGADIEALVREATINAMRKIFNDCDKKAKDQCQNNVDCYNSKMRDCMNNAKVIVTKEDFNKALEVVKPSLTAADIQRYERLAKELKRSVL

SEQ ID NO: 23162 - protein, 700 aa, Sulfolobus tokodaii
MISQQFFFVRVYEGRVKQDVALVSSNIMQSYGLLPGDVILLLGNRQIPFYVQESSDNKIDGIVIGENKLKLLGIRSGERVPVRKVSVSSIKEITLAPSEQKNYDLRKLNLELRGRLVTRGITLESKEGTFAVISYSPQVEVGYISSETRINIAPESIRIAQKNIPYVTLDDVGGLSKQIRELLEIVELALTKVEVARMLGLRPPKGVLLYGPPGTGKTLIAKAIANTIMANFFYISGPEIGSKYYGESEKRLRDIFEQAEKNAPSIIFVDEIDAIAPNRDTTSSETDRRIVAQLLTLMDGLTSGSGVVVIGATNRPNALDPALRRPGRFDREIEIPVPDKQGRLEILKIHTRRVPLSQEVDLEKIAERTHGFVGADLEALVREAVLSAYHRCNGNLECMQVTMSDFDEALKNVEPSALREFRIEIPNTTWEDIVGLEDIKLELKEVVEWPLKDPGLYEEMKAEIPSGILLYGPPGTGKTMLARAVAHESGANFIAINGPELMSMWVGETERAIREVFKKARQSSPTIIFFDEIDAIAVARGADPNKVTDRIVSQLLTEMDGISKRREKVVIIAATNRPDIIDPALLRPGRLEKLIYVPPPDYQTRIALFSRLINNRPHEEIDIERLAKLTENYTPAEIKGIVNKAVLLAIRRAKLKNEKPELTMSDFEEALKTVKPIVTQTMLDYYVSFYQRVRRASGYA

SEQ ID NO: 23163 - protein, 605 aa, Sulfolobus tokodaii
MGVTQFIPLIEVLGAVGITIVLLVLLFRKQTQKFILSDKALQIQQKSQKKKEEVKEKITWDMIGGYDDVKKEIKEYIEIPLKYKEIAKKYGLRPPKGILLFGPPGCGKSLMMRALANEAKINFIYVNVSDIMSKWYGESEARLRELFANARKNAPCILFFDEIDTIGVKRESHTGDSVTPRLLSLMLSEIDGLQSEDGVIIVGSTNVPHLLDKALLRAGRFDKLIYIGVPDKKSRKEIFLIHCKNMPLGEDVDFDKLAEMTERFTGADIANVCQEVARMAAVEALEKGVERKITLQDFINVIKRYKPSVTLQMLDEYEKFRLDYERKFRGPELPESEDAEKITLNDIGGYEEIKKELYDLLEMQFKYYNLMEQMKIPSIRGILLYGPPGVGKTMMAKALARTLGVRLIMLSGAEILYKGYEGAVSAVKEVFNRARENKPSILLLDELDAIAPKRENQKSEASKIVNQLLTEMDGIRSLKEVVVIGTTNRLEDIDPALKRPGRFDRIIYMPLPNKDERKDIFEKYLGKDICEQVNCDKLADITEGYSGADIAAVTREAKLKVLKEIIRGNKERKLTYEDLLEAIAKVKPSVKKEQLNSTSSDLKKE

SEQ ID NO: 23164 - protein, 587 aa, Sulfolobus tokodaii
MNANTSTSPTSSLLSTYINAIELGIIILTFVIPLIYFIYFMRMMRVGHSQQRQLERKMNRIPSITWDQIYDMEEIKARLDEIASYVMKKGKAYGVILFGPPGTGKTSIAKALANKLRWNYFELKSTDVMSKWYGESEYLLDNFFNVVELNAPAVVVIDEIDGFTLKREGDIHEVTHRLINIFLMRLQELHDKSLPVLIIGTTNIPQEIDEALLRPGRFDEVIYVPLPDENGREKIWCGYVQNVDCKELAKRSNRLSPADIKEIVEEVKIQCEKEGRTPTTQDFIKALENYKPSVSIQIIVKFENIAKKYSRHKLGERPYGVPDVRWDDLGDLEDVKRIIKDSIELPLKRKDLAEKLGIKPVKGLLLYGPPGTGKTSIAKALANELNASFIILSGEEISSAGPFNAGEIIAEKFHIARDNAPAIIFIDEIDMIARARGENEWRTALTELLNQMDGIRENEEIVVVGATNRPWDLDPAILRPGRFDKIIYVPPPDEKGRAEVLKVLCRGLTVDEETLQKVAKITDGYTPADLKLVVDEIRRNLLKEATITGVARTTLTFNDFIKILANVKPSVNKETLKMYEEFKIQRI

SEQ ID NO: 23165 - protein, 738 aa, Pyrobaculum aerophilum str. IM2
MSTEVILKVAEARSRDVGRSIVRLPVRIMKKLGIEPGDYVEIIGRKSAYAQVWPAYPEDEDKEVIRMDGIIRQNAGVGIGDTVKVRKAVLKPAQRVVLTPTEPVRVDSEYLKKQILLGKPVARGQAIDVPFYGGAIRFVVVQVQPGPAAYVSIDTEVTVREEPVKEAELTIPRVTWEDIGDLEDAKQKIRELVELPLRHPELFKHLGIEPPKGILLIGPPGTGKTLLAKAVANEANAYFVAINGPEIMSKYYGESEARLREIFEEAKKNAPAIIFIDEIDAIAPKREEVTGEVEKRVVAQLLTLMDGLQERGQVIVIGATNRPDAVDPALRRPGRFDREIHIPMPDKRARREILAVHTRNMPLCTKADVETKICNPGDEVDLDRIAEMTHGYTGADLAALAKEAAMTALRKAMNKGMINIEQDIIPQEVLSKLKVGMSDFLEAMKFVHPTVLREVIIEVPEVHWDDIGGYDTIKQELREIVEWPMKYKHYFDELGVEPPKGILLFGPPGVGKTLFAKAVATESGANFIAVRGPELLSKWVGESEKAIREVFKKARMAAPCVIFFDEIDSIAPARGSRLGDSGVTDRMVNQLLAEMDGIGTLKNVVVMAATNRPDILDPALLRPGRFDRVIYVPPPDLKARIEIFKVHTKRVKLADDVNLEELAKRTEGYTGADIAALVREAAMLALRETIREKTVKAKPVSMKHFEEALKRIPPSLTPEDIRRYEEIAKRLRRAIAGL

SEQ ID NO: 23166 - protein, 731 aa, Pyrobaculum aerophilum str. IM2
MSDWIELRVQESKARDANRPVVRIDPEVMERAGIVVGDVVEIVGRRRTAAKVWNGLPEDRGKGVIRMNSILRKNADVSLNETVKVRRVEPKPAAFVKLAPVSMTIAVDANFLQYIKQRLREYVLVEGDMLQIHVLSQPLTFQVVQTKPSNTVLIITEDTQIQIFEKPVSGVKIPHVTWEDIGDLEDAKQKIRELVELPLRHPELFKHLGIEPPKGILLIGPPGTGKTLLAKAVANEANAYFVAINGPEIMSKYYGESEARLREIFEEAKKNAPAIIFIDEIDAIAPKREEVTGEVEKRVVAQLLTLMDGLQERGQVIVIGATNRPDAVDPALRRPGRFDREIWINPPDFKGRYEILLIHTRNMPLAPDVDLRKLAEMTHGFSGADLAALAREAAMSALRRAIQSGLIDLNQPSIPPEVFEKIKVTMTDFTSALREIVPSALREIHIEVPRVRWEDVGGLENVKQELREAVEWPLKYPDKFKKFGLRPPKGILLFGPPGTGKTLLAKAVATESGANFIAVRGPEIFSKWVGESEKMVREIFRKARMAAPAVVFIDEIDALATARGLGGDSLVTERVVAQLLAEMDGIKALENVVVIAATNRPDLVDPALLRPGRFDRIIYVPPPDFKARLDILLIHTRSTPLAKDVDLEELARRTEGYSGADLELLVREATFLALREDINAKEVSMRHFEEAMKKVRPSITPDMLKFYESWLEKARQLTVSAKAKATPPLYL

SEQ ID NO: 23167 - protein, 819 aa, Anopheles gambiae str. PEST
HPPSVRKQSEETVLQMADSKNDDLATAILKRKDRPNRLIVDEAANDDNSVISLSQAKMDELELFRGDTVLLKGKRRKETVCIVLSDENCPDEKIRMNRVVRNNLRVWLGDVVMIQSCPDVKYGKRVHILPIDDTVEGLSGNLFDVYLKPYFLEAYRPIHKDDTFIVRGGMRAVEFKVVAADPEPYCIVAPETVIHCEGNPIKREEEEETLNAVGYDDIGGCRKQLAQIKEMVELPLRHPSLFKAIGVKPPRGILMYGPPGTGKTLIARAVANETGAFFFLINGPEIMSKLAGESESNLRKAFEEAEKNSPAIIFIDEIDAIAPKREKTHGEVERRIVSQLLTLMDGMKKSSHVIVMAATNRPNSIDPALRRFGRFDREIDIGIPDATGRLEVLRIHTKNMKLADDVDLEQIAAESHGHVGADLASLCSEAALQQIREKMDLIDLEDDQIDAEVLNSLAVSMENFRYAMTKSSPSALRETVVEVPNTTWTDIGGLENVKRELQELVQYPVEHPDKFLKFGMQPSRGVLFYGPPGCGKTLLAKAIANECQANFISVKGPELLTMWFGESEANVRDIFDKARSASPCVLFFDELDSIAKSRGGNVGDAGGAADRVINQILTEMDGMGAKKNVFIIGATNRPDIIDPAILRPGRLDQLIYIPLPDEKSREAILRANLRKSPVAEDVDLNYVAKVTQGFSGADLTEICQRACKLAIRQAIEAEIRRERDRAASQNAAMDMDEEDPVPEITRDHFEEAMKFARRSVSDNDIRKYEMFAQTLQQSRGFGTNFRFPSGQGASSSQGQGSSQPTSNNPGDNGDDDLYS

SEQ ID NO: 23168 - protein, 787 aa, Anopheles gambiae str. PEST
MPPKSASKKEKPFWWNCEKCQTYLPTGELAKHQAEDCGNVNSLGGYVDAGGVYRCRKIEVGGLGIFEEVKLCTDSQRYGLVLVPISVVRRLGLMLGDFVAIKLTKAKDGKEVGTVVRTLWPVEDRHGAKVFFEALDEFNDVSANELNATVTTLDGRLEDAEEIFLRLEDPTQANLFAKNGKFLLTSLKYQLQGCAIMSNNPLSLTVCNKRFRFLVDHALTTEGNDLTDQLNKMSLKDRLYVILRTTKVTLLDDSKAAQHSHQQRMFSLANIGGLDTTISELKELLEMAFGMDSKQTTVGPVSRGILLSGVSGVGKTMLVNALATHYHCHVVRLNCSEVFSKFYGESEANVSRQFAEVFDVHPKPAMVVVEELHNLCPKSTATDIVKRISQHFLTLLDSLHANVRGNRAVVIGTTDSVDNVNPLLRRGGRMDYEFELPVPDAIARTAILERVLSRHGQTVPEQDIRAVARITHGYVGADLENLVSKAASSAPTGKPIDGPALMAALQHVKPSAMREIMIECPNVRWTDIGGQDELKLKLRQIIDWPIHHPELFDRLGIKPPRGLLMFGPPGCSKTMIAKAIATESRLNFLSIKGSELFSMWVGESERAVRDLFRRARQVAPSIIFFDEIDAIGGERSAESGSSVKERVLAQLLTEMDGVSVLKDVRIVAATNRPDLIDRALMRPGRLDRIVYVRLPDAAAREEIFRIKLKTIPTASTVDLAELVRRTAGCSGSEIEAICQEAALKGLESSFDVETIEWEHFEHALGVVRPRTSPELLRLYEEYLKQHQ

SEQ ID NO: 23169 - protein, 572 aa, Anopheles gambiae str. PEST
MGICGVYVKETQGPSVYGEVDRHTVIKIDQILYHPATLTQKPLGGIDGVREQLEAALTESRSLLLIGPSGSGKYSLVKSVISERNLPLFEIRGLHFLRSLPGETEAELRQTFLRLRLFQELIEREKPAILLVKDIDTICPKIGAKKGEDVVNIARIASQFVSLVDQYRESAENVIIIGTTSSVESMDTRLRRPGRLDKEITLGIPSKEQRIDILRCFYATARGTLTDEQLDLVGQRTAGYVGAELELLYYNLVREMHKQQLPFEEALAEIQKKHRPSNLRNATGLVGREATLSLDSFGGMDELKALLRLCIVEQLANPARFQRLGIHPLRGILLYGPPGCAKTTLAKCLAAETGMTFLSLSAAQVYSPYVGDAEKLITRVFNEARTNAPAVVFLDEIDSLVGNRGTGGMKGGSSAVNMGVLSTLLMEMDGIGQAEQAASALSEDAKRVVVIAATNRPDMVDDALLRPGRLTKLIHVPAPDGKGRLEILRKIATNVPFAEDVQLELVAEQTERYSGADLQNLCTQAALNAATEDLNATVVTMAHLRSALQDVRPSLTKEQIDWYHSYEANRLR

SEQ ID NO: 23170 - protein, 1072 aa, Anopheles gambiae str. PEST
IHCKKNVPLSESVCTMHRKTSPFPYDPMIIPRVKQYLEENVHQTYVDTGVMARELQQRYREYNRRKANPFRLLVEEAYRTVLHSYGLDSNPSSEVEEEAGSDVEVMDESAQRNQMSNTLTSMYMNNRARAAGGGGPPVPDQSGSGAAGDAIDISSDEEEGEGGGGGGEGEGGSKKATEAVSESVSGARDDDTSNGSVESVGNGGEKFPPLSKRRRLELANSGGLVAGATNGQASRHPAGSGSKASHKPTNEQHNQQAGSGTPATPAAASSSAAGGQRSKKFRKEIVPRMVDITFDDVGGMDHILKNLCELLLHVIHPEIYRYLGLPPPRGFLLHGPPGSGKTLLAQAIAGQLNVRLIEVPATELVAGVSGESEERIRDVFEQAASLSPCVLFIDEIDAISSNRVNAQKDMERRIVAQLLSSMDALGKQEGGEGVIVIGATNRADALDPALRRVGRFDQEISLGIPDREARKQILRIICWKLRISDTIDYGELAKLTPGYVGADLLALAIRAANNAIKRLFTEREWKLLQQEPEQIADEDVVAIDDEPEEVVNLDDDKDEPKEAETKPADATTEAGTSKAAESTAEESKNEPEQGVADSTQITEPVAPVEPDAATAPTETTTETEPAAAASSEKTQEKVTTNDADAEKMDVDSDQLPTASTVEPPVDTAVAEAEKQVTVEQSDIAMEETKSDNQTTEQAESSTTRVVPAEEAPKEADGADTTVSKPSSVPQKQELTLQQLLDLLLNQQNALPVTKLEGLCIERDDFIEALKTVQPSAKREGFITVPDVTWNDIGSLGDIREELKLAILAPVKFPHRLKLLGLTAPSGVLLCGPPGCGKTLLAKAVANEAGINFISVKGPELLNMYVGESERAVRQCFQRARNSAPCVIFFDEFDSLCPKRSDTAEGSAGTRVVNQLLTEMDGIEERKGVFLMAATNRPDIVDPAVLRPGRLDKILYVGLPAKEDRVDILRALTKNRTQPRLADDVELEKVAELTEGYTGADLAGLVRQASLQTLKDSIVASSLQEETAGGETNAEDELSLMVRFEHFTQAIRNIKPSVTAEDKKHYEKLRLKY

SEQ ID NO: 23171 - protein, 836 aa, Anopheles gambiae str. PEST
KMAETLGKRWRLLLYIARLRYPRYPAYYFPVFVLLQGLKKLRSDLKLRLLDFYLQPIPNVLFEQLQSDQLVASEHTLFVSPTVFREYVVEREINWINLVLKVAKCSEQVEPTPQDKSLVSIILNKQDVSLLCQVAPHADVPLNALWVKENLVENLNERYTRHTGERYWARLQRITEGQHLPAIVAKANIFLYQTPYDLSSDMVDFILGRYFETPRLLYRNHTYQVPLTERFLGNTFYTKHFAVLVHMRSLWFKCLNLDSTAGAFEMSGIAQKSLTTLQQTTTYNNFLLPERFDGPYMRPSCPFGLRKYFHSLRSSLQAYLKMENNGLVRNGIYPVFMLRGERGIGKMAVLRSVASALGIPIYYADCSEIMTSISSQTETKLSTAFNKAKVCEPLIICLENFEVFGVDNEGHEDQRITGSFQAELMTLFGRQYSHPVVVVAVANQKESNTPKLTSLFLEVIQLHAPTTAERLELLRWISLGHRYRLPVAQLQKIAEQSQGFTLADLELLYGNALEAWRRSQDTGRVGLNHFLALLDHMQSTFSDSLGAPKVPKVLWSEIGGLAKLKSEIQNSIGLPLRHKHLMGKNMRRSGILLYGPPGTGKTLIAKAVATECNLSFLSVQGPELLNMYVGQSEQNVREVFARARTASPCVLFLDELDSLAPNRGVSGDSGGVMDRVVSQMLSEMDGISKDPGQQIFILAATNRPDLIDPALLRPGRFDKLLYVGPSCTVEDKESVLRAVTGRFRLAETLTLRKIAESLKQDMTGADMYSICSNAWLSAVRRTVKEAIAGDSIDEGLNADQVIVTEDDFKESVKKFIPSISPADMAYFNQLKGNFSA

SEQ ID NO: 23172 - protein, 870 aa, Giardia lamblia ATCC 50803
MDNKSICSKFNNRFIVNDNPGGDDSQIILSSEKVNVLDLFQGDYVRLKGRFGKTTHAMVQSREDVDKIVVLMNKTMRANLGVNLGDIVILYPAQNLPYHKRIKVIPFEQDLEGLNIAGYTVKQGEDGKPAPAPFPGPTYDLFDICIAPYFKDKCRPVTEGNTFKVMTTSLPVNREIEFKVVLTDPSPACIVMDGGEIFYEGEPIDRDEHERENTKVGYSDLGGLGKELGMIREQIELPLRHPELFKYLGVKPPRGILLTGPPGCGKTTIGKAIANEAGAYFFLLNGAEIMSSMAGESEKNLRKAFDICEQEAEKSAKENDGVGCAILFIDEIDCIAGNRAESKGEVEKRVVSQLLTLMDGIKPRSNVIVLAATNRPNVIDPALRRFGRFDREIQINVPDENGRLEILSIHTRKLKLHPDGVDIVRIANETNGYVGADLAQICTEAAMMCVRESMEMVLDMESEEKLTDEQLNKIFITDSHFTAAISKVTPSTLRETVIEMPTVTWDDIGGLEHTKRELIELIQYPIRYKEKYQQMGIEPSRGALLWGPPGTGKSLLAKAIANECGCNYISIKGPELLSKWVGESEQNIRNIFDKARQAAPCVLFFDEIESITQHRGTSASGGGEVTDRMLNQILTELDGVGVRKDVFIIGATNRPDTIDSALMRPGRLDTLIYIPLPDYPSRVAVLKAHLRKSKVNEKEVSLEQIAQVTDGYSGADLAEICSRACKYSIRENVEGFSRAMSAFESMKKSWLDSHGGVLTPEKEKEFAEHEEKISERFSDTSISGRHFEQAIRESRKSISEEEMRRFEVFKQSYSGGIGDGLGSMGNAGRRNANPAIANFSFKVDGQTGARQQPQGAVRSKAGAGNEADMF

SEQ ID NO: 23173 - protein, 339 aa, Giardia lamblia ATCC 50803
MQSSNILDGMAKSMITLNDFLFATQSLIPTALREGFATVPDVSLDDIGALDFLKAELDRYLLQPLKNPERFERLGLNRFSGIIMFSVPGQGKTLICKALSAKAEINFISVKGPELLNMYYGESERAIRNVFARARASAPCILFLDEFDSLAKRRGSGGSSSDVSDKVVNTLLTELDGLHNNLSGEHSLNAKNAQDQIFIIAATNRIDIIDPGLLRPGRFDKIIYIPLPNLEDRVNILYTIITRRQISLDKSLQNPQDLREFLTEYLAKQTKGCTGADLEGLVRRAAMAVIAESQTGTEICKRHFMTALSQTKASVNEEDRIKYDMMAAHYSKLCISENK

SEQ ID NO: 23174 - protein, 796 aa, Pyrococcus furiosus DSM 3638
MSEKKKEVKLKVASAYQRDVGRGIVRIDRETMRELGISPGDVVEIIGTKNTAAIAWPAYPEDEGLGIIRMDGTIRKNAGVGLGDEVIVRKADVKEARKVVLAPTEPIRFGRDFIEWLHERLIGRPVVRGDYIKVGVLGQELTFVVTTTQPAGVVQITEFTDFDVSERPVKEVEKRITTGVTYEDIGGLKDVIEKIREMIELPLKHPELFEKLGIEPPKGVLLYGPPGTGKTLLAKAVANEANAYFIAINGPEIMSKYYGESEERLREVFREAEENAPAIIFIDEIDAIAPKREEVTGEVEKRVVAQLLTLMDGLKSRGKVIVIGATNRPDAIDPALRRPGRFDREIEIGIPDKQGRKEILQIHTRGMPIEPDFRKDDVLKILEELRGEEKFKDVIDRAIDQVSKAKEEEIQQVLKRISQDLYEEVKARLIDKLLEELAEVTYGFVGADLAALAREAAMAALRRLIREGKIDFEAETIPREVLEELKVTRRDFYEALKMVEPSALREVLIEIPNVHWDDIGGLEEVKQQLREAVEWPLKYPEAFRAFGITPPKGILLYGPPGTGKTLLAKAVATESQANFIAIRGPEVLSKWVGESEKRIREIFRKARQAAPAIIFIDEIDAIAPTRGTDVNRVTDRIINQLLTEMDGIVENSGVVVIGATNRPDIIDPALLRPGRFDRLILVPAPDEKARLEIFKVHTRGMPLADDVDLKELARRTEGYTGADIAAVCREAALNAMRRALEQGIIKEGMKADEIRKVAKVTMKDFEEALKKIGPSVSKETMEYYLKVQEKFKQARG

SEQ ID NO: 23175 - protein, 837 aa, Pyrococcus furiosus DSM 3638
MIIGRGEERKEEIKLRVAEALKWDVGRGIVRFDKKYQRMLGVEPGDIVEIEGNRITAAIVANAHPDDRGLDIVRMDGYIRKNAGVSIGDYVTIRRAEVKEAKKVVLAPAQKGVYIQIPGDLVKNNLLGRPVVKGDIVVASGRSEFYTGTPFDEIFRGFFEMSMGFGELKFVVVSTVPRGIVQITYNTEVEVLPQAVEVREEKVPEVTYEDIGGLKEAIEKIREMVELPLKHPELFERLGIEPPKGVLLYGPPGTGKTLLAKAVANEANAYFIAINGPEIMSKYYGESEERLREIFKEAEENAPAIIFIDEIDAIAPKREEVVGEVEKRVVSQLLTLMDGLKSRGKVIVIAATNRPDAIDPALRRPGRFDREIEVGVPDKQGRKEILQIHTRGMPIEPDYDKESVIKALKELEKEEKYEKSEIKKIIEEISKATSEEEVKEILKKHGKIFMDVRAKLIDKLLDELAEVTHGFVGADLAALAREAAMVVLRRLIKEGKINPEAESIPREVLEELKVTRRDFYEALKMVEPSALREVLIEIPNVHWDDIGGLEEVKQQLREAVEWPLKYPKAFKRLGISPPKGILLYGPPGTGKTLLAKAVATESQANFIAIRGPEVLSKWVGESEKRIREIFRKARQAAPAIIFIDEIDAIAPARGGYEGERVTDRLINQLLTEMDGIQENSGVVVIGATNRPDIIDPALLRPGRFDRLILVPAPDEKARLEIFKVHTRGMPLADDVDLKELARRTEGYTGADIAAVCREAALNALRRVVKSVPKEELEEESEEFLDKLIVTRKDFEEALKKVKPSVNKYMMEYYRQFEESRKRISGESMGREPDYFTG

SEQ ID NO: 23176 - protein, 732 aa, Methanothermobacter thermautotrophicus str. Delta H
MGCMTKKEIKLKVAEALAQQDVGRGIARVDPACMEKLGLSDGDIIEIEGKKLTAATVVSSQSDIGLGIIRIDGYLRKNAGASIGEEVTVRRADVKDAQKVVLAPVDQEVIIRGDIRSAFLNRVLVKGDIIVSGIRQHISGGGLFDEFFRDFMDISPLGEIKLAVVSTSPAGVVRVTPSTQVEMQQKPVDVSKLEGVKNLVDVTYEDIGGLKEEVKKVREMIEIPLKRPELFERLGITPPKGVLMHGPPGTGKTLLAKAVANESDAHFIAINGPEIMSKYVGGSEERLREFFEEAEENAPSIIFIDEIDAIAPKREDVSGEVERRIVAQLLTLMDGLKSRGQVVVIGATNRPDALDPALRRPGRFDREIEIGVPDREERKEILQIHTRGMPLADDVDLDELAEITHGFVGADLESLCKESAMRVLRRVLPEIKADEEIPKEVLKKMVVTRADFKDALKEIQPSALREVLVQVPNVSWDDIGGLEGAKQELREAVEWPLKYPDRFKKFGIRPPKGILLHGSPGTGKTLLAKAVANESQANFIAVKGPELLSKWVGESEKGVREVFRKARQTAPTVIFFDEIDSIASVRSGSTADSGVTQRVVNQLLTEIDGLEELQDVAVIAATNRPDILDPALLRPGRFDRHVKVEDPDKEARLAIFRVHTKDMPLADDVDLEKLAEKTEGYVGADIEAVCREAAMLTLRDNMDAEEVSMKYFLEAMEKVKPKGGVEEQVQYH

SEQ ID NO: 23177 - protein, 753 aa, Methanosarcina acetivorans C2A
MTEEMNLRVAEAYHKDVGRGIARIDTRLMQEMGLVSGDIIEISGRSKTYAIVWPNVERGQENRIRIDGNLRSNAKVGIDDRVTIQKVQAKHAQRVTLAPSQPVRLVGGAHYILRIIEGRPLNKGQQIRVETVNNPLTFVVASTRPAGPVVVTKDTEIVIKEKSIEEIKTPEGISYEDIGGLRREIQLVREMIELPMRHPELFQKLGIEPPKGVLLHGPPGTGKTMIAKAVASETDANFITISGPEIVSKYYGESEQKLREIFDEAEKDAPSIIFIDEIDSIAPKRGEVTGEMERRVVAQLLSLMDGLKSRGEVVVIAATNRPNSIDEALRRGGRFDREIEIGIPDRNGRRQILLIHTRGMPLEDEVSLGEIADVTHGFVGADLSSLCKEAAMHALRRITPEIDIEEEIPQEIIDNLVVTKEDFREALKNIEPSAMREVYVEVPHVGWDDIGGLDKAKQELIESVEWPLKYPEMFKAVNIKPPRGVLLFGPPGTGKTLLAKAVASESEANFISIKGPELLSKYVGESERAIRETFRKAKQAAPTVIFFDEIDSIAPERSSVSDTHVSERVVSQILTELDGVEELKDVIIVAATNRPDMVDPALLRPGRFDRLIYIKPPGKEGREKIFEIHTKGKPLAEDVKLSELAEMTEGYVGADIEGICREAAMLALREIVTPGTDRKSIKEKAGDVRLSKRHFERAIRRVRPTTSRETLSAYEKSAELFARYAAELEEESSEAKEEEKEIEGKEVPNFPKV

SEQ ID NO: 23178 - protein, 786 aa, Methanosarcina acetivorans C2A
MEEIQLKVEKAYPIDLGRGIIRLDPAALLKLQLSPGDIVEIRGKKKTTAKVWRADRQDWEQGIVRIDNFIRQNAGVSIGEKVTIKKVEAPEAKKLILALPESMTQGGPELQFGEHANEIIKRHILKRPVFKGDIIPIINSMSQPMTESLTTSQVIPLVAVETDPANTIVLITEATIIELRKKPVQGYEKATRGVTTYEDIGGLGQEIMRVREIIEMPMKHPELFAHLNIEPPKGVILYGPPGTGKTLIAKAVANESGASFHYIAGPEIVGKFYGESEERLRKIFEEATQDAPSVIFIDEIDSIAPKRENVTGEVERRVVAQLLTLLDGMEERGQVVVIGATNRVDAIDPALRRPGRFDREIHIGVPDTKDRYEILQIHTRGMPIEKDDEITPAESEVELEEATEIEAEIEVDEAALEREKKEKTNRYLMYLAEKTQGFVGADLLALVQEAAMRCLRENLPDLDLEKETIPPERLEKIVVTKKNFEDALMEAEPSALREIFVEMPSVGWDGVGGLDEAKNAIIEAVEWPIKNPEKFVKLGIKAPKGILLYGPPGTGKTLIAQAVAKESNANFISVKGPEMFSKWLGESEKAIRETFKKARQVAPCVVFFDEIDSIAAMQGMESTDSRTSERVLNQLLTEMDGLETLKDVVIIAATNRPNLLDPAIMRPGRFDRLVYVGAPDRKGRMKIFKIHTRNTPLAEDVDLENLANITEGYVGADIEAVCREAVMFALRENFDVEAIEMRHFREALKKVKPTINENIAQFYEKIEEQFKGGQRPAETAGYVGYR

SEQ ID NO: 23179 - protein, 764 aa, Methanosarcina acetivorans C2A
MTEEDKSTIKLKVAEADQRDVGKGIVRIDERFREKLGLKPFDVVEIKGGKSTSALIGRPYPSDAGLDIIRMDGLIRTNAKTSIGEYVDIRKADWKEAKSVTFAPVAQGMQIYAPSETLKAVFMNRTVSKGDFISTTSLRRSRERETFGKGVMFEDFFQDFFGQGFGPSFGLGEIKLQVVSTAPAGIVKITDMTQVELLPEAMEIISEQNIPTVMYEDLGGLKDAISKVREMIELPLKHPELFDRLGIDAPKGVLLQGPPGTGKTMLAKAVANESDAYFISINGPEIMSKYYGESERAIREIFEDAEKNAPAIIFLDEIDSIAPKRAEVTGEVERRVVAQLLSLMDGLKARKNVIVIGATNRPEALDIALRRPGRFDREIELRVPDTEGRLEIFQIHTRGMPLADNVNLMDFAQITYGFVGADIAALCREAAMSALRRILPKINLNEPEISKEILDALQVTREDFENALKDVQPSAIREILIEVPNVSWEDVGGLERVKELLKEVVEWPLKNPESYRDIGVEAPKGVLLYGPPGTGKTLLAKAIAHESDANFITAKGSDLLSKWYGESEKRIAEVFTRARQVAPSIIFLDELDSLAPIRGTSVGEPQVTARILNQLLSEMDGLEELRAVVVIGATNRPDIIDPALLRPGRFDELILVPVPDEGARREIFRVHTKNMALAEDVDIEKLVSFTDQYTGADIAAVCKKAGRHALREDLHAKKVRQKHFLQAIEETGPSVTPDTMKYYEAIKGELRKRKSKEIENPYYV

SEQ ID NO: 23180 - protein, 1249 aa, Methanopyrus kandleri AV19
MPGLPIKLRVEKAYPEDVGKRAVRMDKASRDRIGVSEGDLVKITGSKTTVARVLPAKKEDVGKGIVRMDKYERQNAGASVGEPVEVDRAEEKVAKRVELMPTERVVVPVQAGLKEEVEEELTREHEQDILEQIKRYLRSRAQQTPIPATHRDVIPLEVQGKTIAGHVLIKFPDSLLVVGIEPEDATVIGPETEIEVKPYSEDLAKAAEIPDVTYDDIGGLDREIELIREYVELPLKRPELLKELGIKPPKGVLLYGPPGTGKTLLAKAVANECGAKFYSINGPEIMSKYYGESEARIREVFEEARKNAPAIIYIDEIDAIAPKRGETGEVERRVVAQLLTLMDGLSEDERVVVLASTNRPDDIDPALRRPGRFDKEIEIGVPDKEGRKEILQIHTRDMPLADDVDLDKLAELTHGFTGADLEALCKSAGLKALRRAIRKIGAKLAEKGEKEEREVAVKVSELSDEELMEVLEKGLDRARIPEEKKRALRRVLREAEEEEKEEVAYTDALDKVLEAEELPEIREELKVTMRDFMEALKEIEPSALREVIVEVPDVSWDDVGGLEDVKQELKEAVEYPLKYPEVYEKLGTRPPKGILLYGPPGTGKTLLAKAVANESDANFIAVRGPEVLSKWVGESIPGDEVVWAKVDGEAKLIPIEDLYELWKEGRDVEVAALTEEGVVWSSVDRVARHRRRTGLVKIITRTGREVIVTEDHSVFTVRDGKIVDVPTSELSEGDWIVLPARLPAGDSDEIDGIKIDEDLAFLLGLYVAEGSLTNQKDAVRIHNKDPEVIEEIDRIVREKGWEGRYYESDHSYWIKSRKLRQLCEKLGTKAREKRLGPLLSLKPELLAAALRGYYTGDGSFSVKPHGRSAIIEATTVSKRLADELLVALQILDIVARRYECDDTKGSTRYRVMITKSEYIRTFVEKVGFAQSEKNERIRKFLAERKWTRGRSDIPTELIGSPYTYVEVEYISDRVAADGGLMKAELEHLYFDKIKEIVPLDRDDEYVYDVVEVKLGHNFVGGQGVLLHNSEKKIREIFQKARQTAPCVIFFDEIDAIAPKRGTEVGGSRVTERIVNQLLTEMDGIEATEDVFVIAATNRPDIIDEALLRPGRFDRIVYVPPPDEEAMKEIVKIHTRDMPLAEDLTVDDIVEILRRREREEDAKYTGADIEAVCMEAAMLALREVLDELERIEKESETEEELEARKEALLEELRVERRHFEKAVEKVPPSVPKEKLEEYEKLKEEYQRLAG

SEQ ID NO: 23181 - protein, 751 aa, Methanosarcina mazei Goe1
MTEEINLRVAEAYHKDVGRGIARIDTRLMQEMGLVSGDIIEISGRSKTYAIVWPNVERGQENRIRIDGNLRSNAKVGIDDRVTIQKVQAKHAQRVTLAPSQPVRLVGGAHYILRIIEGRPLNKGQQIRVETVNNPLTFVVASTRPAGPVVVTKDTEIIIKEKSIEEIKAPEGISYEDIGGLRREIQLVREMIELPMRHPELFQKLGVEPPKGVLLHGPPGTGKTMIAKAVASETDANFITISGPEIVSKYYGESEQKLREIFEEAEKDAPSIIFIDEIDSIAPKRGEVTGEMERRVVAQLLSLMDGLKSRGEVVVIAATNRPNSIDEALRRGGRFDREIEIGIPDRNGRKQILLIHTRGMPLEDEVSLSEIADVTHGFVGADLSSLCKEAAMHALRRITPEIDIEEEIPQEIIDNLVVTKENFREALKNIEPSAMREVYIEVPHVGWDDIGGLEKAKQELIESVEWPLKYPEMFKAVSIKPPRGVLLFGPPGTGKTLLAKAVANESEANFISIKGPELLSKYVGESERAIRETFRKAKQAAPTVIFFDEIDSIAPQRSSVSDTHVSERVVSQILTELDGIEELKDVIIVAATNRPDMVDPALLRPGRFDRLIYIKPPGKEGREKIFEIHAKEKPLAEDVKLSELAEMTEGYVGADIEGICREAAMLALREIVTPGADRKNIQEKAAEVRLSKRHFEKAIRRVKPTTSRETLSAYEKSAELFARYATEFEEESSEEKDQEIKVEEKDQETRV

SEQ ID NO: 23182 - protein, 792 aa, Methanosarcina mazei Goe1
MEEIQLKVEKAYPIDLGRGIIRLDPTALLKLQLSPGDIVEIRGKKKTTAKVWRADRQDWEQGIVRIDNFIRQNAGVSIGEKVTIKKVEAPEAKKLILALPESMTQGGPELQFGEHANEIIKRHILKRPVFKGDIIPIINSMSQPMTESLTTSQVIPLVAVETDPANTIVLITETTNIELRKKPVQGYEKATRGVTTYEDIGGLGDEIMRVREMIEMPMKHPELFAHLNIEPPKGVILYGPPGTGKTLIAKAVANESGASFHYIAGPEIVGKFYGESEERLRKIFEEATQEAPSVIFIDEIDSIAPKRENVTGEVERRVVAQLLTLLDGMEERGQVVVIGATNRVDAIDPALRRPGRFDREIHIGVPDTKDRYEILQIHTRGMPIEKDEESVTGEPAPEVEIGALDEFEVETGTEIEVDEAAMEREKKEKTNLYLMSLAERTQGFVGADLLALVQEAAMRCLRENLPDLDLEIDTIPPERLEKIVVTKKNFEDALMEAEPSALREIFVEMPSVSWGDVGGLDEAKHSIIEAVEWPIKNPEKFVKMGIKAPKGILLYGPPGTGKTLIAQAVAKESNANFISVKGPEMFSKWLGESEKAIRETFKKARQVSPCVVFFDEIDSIAGMQGMESTDSRTSERVLNQLLTEMDGLETLKDVVIIAATNRPNLLDPAILRPGRFDRLVYVGAPDRKGRLRIFKIHTQNTPLAEDVNLENLADTTEGYVGADIEAVCREAVMFALRENFDIEAIEMRHFREALKKVKPTINENIAQFYEKIEEQFKGGQRPVETAGLVGYR

SEQ ID NO: 23183 - protein, 764 aa, Methanosarcina mazei Goe1
MTEGDKSTIKLKVAEADQRDVGKGIVRIDEKFREKLGLKPFDVVEIRGGKSTSALIGRPYPSDSGLDIVRMDGLIRMNAKTSIGEYVDIRKADWKEAKSVTLAPVAKGMQIYAPSETLKAVFMNRTVSKGDFISTTSLRRSRERETFGKGVMFEDFFQDFFGQGFGQSFGLGEIKLQVVSTSPSGIVKITDMTQVELLPEATEITPEQNIPTVMYEDLGGLKDAIGRVREMIELPLKHPELFDRLGIDAPKGVLLHGPPGTGKTMLAKAVANESDAYFISINGPEIMSKYYGESERAIREIFEDAEKNAPAIIFLDEIDSIAPKRAEVTGEVERRVVAQLLSLMDGLKARKNVIVIGSTNRPEAIDIALRRPGRFDREIELRVPDTEGRLEIFQIHTRGMPLADNVNLMDFAQITYGFVGADIAALCREAAMSALRRILPKINLNEPEIPGEILDSLQVTREDFENALKDVQPSAIREILIEVPNIGWDDVGGLGEVKELLKEAVEWPLKSPESYRNIGVEAPKGVLLYGPPGTGKTLLAKAIAHESDANFITAKGSDLLSKWYGESEKRIAEVFTRARQVAPSIIFLDELDSLAPVRGASTGEPQVTARILNQLLSEMDGLEELRAVVVIGATNRPDMIDPALLRPGRFDELILVPVPDEGARREIFRVHTENMALAEDVDIEKLVSLTDQYTGADIAAVCKKAGRYALREDLHAKSVRQKHFLQAIEETGPSVTPDTMKYYQAIRGELRKRKSKEIESPYYI

SEQ ID NO: 23184 - protein, 526 aa, Corynebacterium efficiens YS-314
MGDMASSTDPAAHNSFSDFNREEMTRLADNVRSLQRTNQDLSARNTKLAEMLKSSRDKLSMMYQQLEDMAQPPSLYGTFLEMSKDGTNAEIFAGGRRMRVAMSPMLCAGDLMPGVQVRLGEGNQILEACDFEQTGDLATLMEMIGRDRALISDRSGEERVVKLAGPLMDRTRKLPRPGDTLLVDRRAGYAFENIPKTEISKLALEEAPDVSYVDIGGLDDQIELIQDAVELPFLHPEMYRSYKLHPPKGVLLYGPPGCGKTLIAKAVANSLSQRIGDAGTSYFINVKGPELLNKYVGETERQIRVIFERARELAGDGRPVIIFFDEMESIFRTRGSGISSDMETTVVPQLLAELDGVEDLSNVIVIGATNREELIDPAILRPGRLDIKIRVQRPNRSGARDIFARYITDAIPLAAPVDELIDTAVDHLFTPRPYVRLTLIDGTVETLNYHDFVSGAMIANIVDRAKKSAIKDHIDGRTTGLSAEHLIHAIDQENQQSEDLPNTSNPDEWTRIIGRQGKRVAEVEVV

SEQ ID NO: 23185 - protein, 639 aa, Trichodesmium erythraeum IMS101
MNNFFGLDVKDLVELAKTLEEKAKSGEIKTSFEVQSGPMRNIPRHGNIPRGMGRSNYQAQTGQSSQDTNFTVQSPNKDSVTQNRAQEKTNSTTSSPETKLRPTLRDIGGMSEVIQELREVIELPLKRPDLLTKLGLEPSRGVLLVGPPGTGKTLTAKAIAEELGLNYIAINGPEVMSKYYGEAEGKLRDIFAKAKKSAPCLIFIDEIDSIAPDRSKVEGEVEKRLVAQLLGLMDGFEVLEGVLLLAATNRPDHIDPALRRPGRFDQEVYFHVPDRDGRSEILQILTKAMPLDNSVDLEEIADLAVGLVGADLKAVCQKAAYFALRREVPSLENLNIQTPEDMSLLQSDLLRAIKEIKPSILRSVAVEVPNVSWQHIGGLDVVKQKLQESVEGALLYPELYEKTKAKAPKGILLWGEPGTGKTLLAKAVASQAQANFIAVNGPELLSKWVGAAEEAVRELFSKARQVSPCVIFIDEIDTLAPARGKTMGDSGVSDRLVGQLLTELDGLRDCTQLLLVGATNRPDALDPALLRAGRLDLQIKVDLPDQASRLEILKVHNQDRPLEEVNLEDWASRTEGWNGADLALLTNQAALAAIRSYSAQGIKSSKENDIKITSADFENAYNALKSQKQSNNFDSDICV

SEQ ID NO: 23186 - protein, 903 aa, Methanocaldococcus jannaschii
MVKELKVAEAYQGDVGRGIARIDPYTMEELGLKPGDVIEIEGPKGKAYAIVYRGFLEDAGKGIIRIDGYLRQNAGVAIGDRVKVKRVEIKEAKKVVLAPTQPIRFGPGFEDFVKRKILGQVLSKGSKVTIGVLGTALTFVVVSTTPAGPVRVTDFTHVELKEEPVSEIKETKVPDVTYEDIGGLKEEVKKVREMIELPMRHPELFEKLGIEPPKGVLLVGPPGTGKTLLAKAVANEAGANFYVINGPEIMSKYVGETEENLRKIFEEAEENAPSIIFIDEIDAIAPKRDEATGEVERRLVAQLLTLMDGLKGRGQVVVIGATNRPNALDPALRRPGRFDREIVIGVPDREGRKEILQIHTRNMPLAEDVDLDYLADVTHGFVGADLAALCKEAAMRALRRVLPSIDLEAEEIPKEVLDNLKVTMDDFKEALKDVEPSAMREVLVEVPNVKWEDIGGLEEVKQELREAVEWPLKAKEVFEKIGVRPPKGVLLFGPPGTGKTLLAKAVANESGANFISVKGPEIFSKWVGESEKAIREIFRKARQSAPCIIFFDEIDAIAPKRGRDLSSAVTDKVVNQLLTELDGMEEPKDVVVIAATNRPDIIDPALLRPGRLDRVILVPVPDEKARLDIFKIHTRSMNLAEDVNLEELAKKTEGYTGADIEALCREAAMLAVRESIGKPWDIEVKLRELINYLQSISGTFRAAAVELNSVIKATKERESAEAGEFSELKNAIGKIISVLSPAKEKIEAVEKEIDKFLEVINKEELKPSEKDEAQKLAKYLKDILGKLKEMIDNIYELENKLNTLKEQVSAEEIDEIIKTTQNIIQRFTTSLDELKNILKDIESIRLKVSTKDVKIKKEHFMKALEKIKPSVSKEDMRVYEKLAQEYGRATSVEKKKEEGKEVI

SEQ ID NO: 23187 - protein, 775 aa, Methanosarcina barkeri
MEEIQLKVEKAYPIDLGRGIIRLDPTTLLKLQLSPGDIVEIRGKKKTTAKVWRADRQDWDQGLVRIDNFIRQNAGVSIGEKVTIKKVEAPEAKKLVLALPESMMQGGPELQFGEHANEIIKRHILKRPVFRGDIIPIINSMSQPMTESLTTSQVIPLVAVETEPSNTIVLVTEETLIELRKKPVQGYEKATRGVTTYEDIGGLGAEIMRVREMIELPMKHPELFGHLNIEPPKGVILYGPPGTGKTLIAKAVANESGASFHYIAGPEIVGKFYGESEERLRKIFEEATQDAPSVIFIDEIDSIAPKRENVTGEVERRVVAQLLTLLDGMVERGQVVVIGATNRVDAIDPALRRPGRFDREIHIGVPDTKDRYEILQIHTRGMPIERDEETEEIGKVETEADEAALERERKEKADKYLMYLAERTQGFVGADLLALVQEAAMRCLRENLPDLDLEKEAIPPERLEKIVVTKRNFEDALMEAEPSALREIYVEMPTVSWNDVGGLDEAKQSITEAVEWPIKNPEKFSHMGIKAPRGILLYGPPGTGKTLIAKAVAKESNANFISVKGPEIFSKWLGESEKAIRETFRKARQVAPCVIFFDEIDSIASMPGMESTDSHTSERVLNQLLTEMDGLESLRDVVVIAATNRPNLLDPAILRPGRFDRLVYIGSPDRKGRLKIFRIHTKDTPLAENVNLETLADETEGYVGADIESVCREAVMIALRENFDTEYVEMRHFREALKKVKPTITENIAQFYEKIEAQFKGGQRLTETAGYIGYR

SEQ ID NO: 23188 - protein, 365 aa, Methanosarcina barkeri
MPLAENVNLMDFAQITYGFVGADIAALCREAAMSALRRVLPKINLNEPEIPAEILDSLQVIREDFENALKDVQPSAIREILIEVPTVGWDDVGGLEEVKRLLKEVVEWPLKNPESYRDIGVEAPKGVLLYGPPGTGKTLLAKAIAHESDANFITAKGSDLLSKWYGESEKRIAEVFTRARQVAPSIIFLDELDSLAPIRGASISEPQVTARILNQLLSEMDGLEELRAVVVIGATNRPDVIDPALIRPGRFDELILVPIPDEGARREIFKVHTEKMELAEDIDIEKLVSITDQYTGADIAAVCKKAGRLALREDIHAKNVKQRHFLKAITETGPSVTPDTMKYYEAIKGELRTRKSKEIENPSYI

SEQ ID NO: 23189 - protein, 307 aa, Methanosarcina barkeri
METVNNPLTFVVASTRPAGPVVVTKDTDIVIKEKSAEEIRVPEGISYEDIGGLRREIQLVREMIELPLRHPELFQKLGIEPPKGVLLHGPPGTGKTLIAKAVASETDANFITISGPEIVSKYYGESEQKLREIFEEAEKEAPSIIFIDEIDSIAPKRGEVTGELERRVVAQLLSLMDGLNSRGEVVVIAATNRPNSIDEALRRGGRFDREIEIGIPDRNGRKQILLIHTRGMPIQDVSLSEIADVTHGFVGADLSSLCKEAAMHALRRITPEIDIEEDEIPQEILDKLVVTKDDFKEALKEISSRLQ

SEQ ID NO: 23190 - protein, 414 aa, Methanosarcina barkeri
MEIRGGKSTSALLGRPYPSDSGLDIIRMDGLIRTNAKTSIGEYVDIRKADWKEARSVTLAPVAKGMQIYAPSETLKAIFMNRTVSKGDFISTTSLRRSRERETLGKGIMFEDFFQDFFGPGMGQSFGLGEIKLQVVSTSPSGIVKITDMTEVELLPEAAEITPEQNVPTVMYEDLGGVKEAITKIREMIELPLKHPELFDRLGIDAPKGVLLYGPPGTGKTMLAKAVANETDAYFISVNGPEIMSKYYGESEKGIRDVFEDAEKNAPAIIFLDEIDSIAPKRAEVTGEVERRVVAQLLSLMDGLKARKNVIVIGSTNRPEAIDMALRRPGRFDREIELRVPDTEGRLEIFQIHTRGMPLAENVNLMDFAQITYGFVGADIAALCREAAMSSLRRILPKINLNEPEIPSEILDTL

SEQ ID NO: 23191 - protein, 279 aa, Methanosarcina barkeri
MSWEDVGGLEGVKQLLKEAVEWPLKSPESYRDIGVEAPKGVLLYGPPGTGKTLLAKAIAHESEANFITAKGSDLLSKWYGESEKRIAEVFSRARQVAPSIIFLDELDSLAPIRGAAIGEPQVTARILNQLLSEMDGLEELRAVVVIGATNRPDIIDPALLRPGRFDELILVPVPDAGARKEIFRVHTAKMSLAEDVDIDKLVSMTDQYTGADIAAVCKKAGRDALREDLHAKEVKQKHFLQAIAETGPSVTPDTMKYYQAVQSGLRKRQSKEIETPFYT

SEQ ID NO: 23192 - protein, 742 aa, Halobacterium salinarum
MNEVQLEVAKAYPNDSGRGIARLDPDTLLHLKLSPGDIIDIEGAETTAAKVWRADRQDWNTDTIRIDGFTRQNAEVGIGERVKIRKADAEKADTLVLAPPEEASVQFGSDAAGMVKRQILKRPVVARDIVPVMSSTNHPFMRSPGQAIPLIAVETEPEGVCLVTEDTDVELREEPISGFERTGGGITYEDIGGLENEIQRVREMVELPMKHPQIFQKLGIEPPQGVLLHGPPGTGKTLLAKAVANETSASFFSIAGPEIISKYYGESEQQLREIFEDAKDDSPSIIFIDELDSIAPKREDVTGEVERRVVAQLLTMMDGLEGRGQVIVIAATNRVDAVDPALRRPGRFDREIEIGVPDEIGREEILKIHTRGMPLSDDVNLSTLADDTHGFVGADIESLSKEAAMRALRRYLPEIDLDEEDIPPSLIDRMIVKREDFKGALSEVEPSAMREVLVELPKITWDDVGGLTEAKNNVKESVEWPLNQPEKFTRMGVEPPAGVLLYGPPGTGKTLMAKAVANETNANFISVRGPQLLSKWVGESEKAIRQTFRKARQVAPTVIFFDELDSLAPGRGQTGGNNVSERVVNQLLTELDGLEEMEEVMVIAATNRPDIIDPALIRSGRFDRLVQVGQPGIEGREQILKIHTQDTPLAADVSLRELAERADGYVGSDLANIAREAAIEALRDDEDADDVGMAHFRAAMENVRPTITDDLMEYYDQVEDQFKGSQGPNVNSRQGSEHIGFQ

SEQ ID NO: 23193 - protein, 733 aa, Archaeoglobus fulgidus DSM 4304
MSDKKGEEITLRVAEAFYRDVGRGVARIDPAVMEKYGLQSGDIIEIIGKSTVPAIVWPSYPEDRGTGIIRIDGSIRSNAGVGIDDKVRIRKVTAKPAEKVTLAPTEPVRLMGGEAYLLRLLEGRPVIKGQKIRVEVFGHTLTFVITATRPSGVVVVTRNTAIELKEKPAEEVKRAVPDVTYEDIGGLKRELRLVREMIELPLKHPELFQRLGIEPPKGVLLYGPPGTGKTLIAKAVANEVDAHFIPISGPEIMSKYYGESEQRLREIFEEAKENAPSIIFIDEIDSIAPKREEVTGEVERRVVAQLLALMDGLEARGDVIVIAATNRPDAIDPALRRPGRFDREIEIGVPDKEGRKEILEIHTRKMPLAEDVDLEELAELTNGFVGADLEALCKEAAMHALRRVLPEIDIEAEEIPAEVIENLKVTREDFMEALKNIEPSAMREVLVEVPNVKWEDIGGLEHAKQELMEAVEWPLKYPEVFRAANIKPPRGILLFGPPGTGKTLLAKAVANESNANFISVKGPELLSKWVGESEKHVREMFRKARQVAPCVIFFDEIDSLAPRRGGIGDSHVTERVVSQLLTELDGLEELKDVVVIAATNRPDMIDPALLRPGRLERHIYIPPPDKKARVEIFKIHLRGKPLADDVNIEELAEKTEGYSGADIEAVCREAGMLAIRELIKPGMTREEAKEAAKKLKITKKHFEEALKKVRPSLTKEDVEKYEKLIEDFHRMYA

SEQ ID NO: 23194 - protein, 811 aa, Archaeoglobus fulgidus DSM 4304
MGDNMEITLKVNQAYPSDSGRGIARLDPDTMLKLQISPGDIIEIEGARKTVAKVWRAPKRDWGKNIIRIDRFIRENAGVGVGDVVKVRKVEYQPAKTVILAPLKKMDLRIYGVDIGEYLKHQFLKRPVVEGDLVPLVGSPALSGFGRYNQQNQAVVFVAVKTEPKGPVVIDETTKVVYRDRPAKGFERFGKAGITYEDIGGLKEELQKVREVIELPLRYPELFQRLGIEPPKGVLLYGPPGTGKTLIAKAVANEIGASFFTINGPEIMSKFYGESEQRLREIFEEAKENAPSIIFIDEIDSIAPKREEVTGEVERRVVAQLLTLMDGLEERGQVIVIGATNRIDAVDPALRRPGRFDREIEIGVPDREGRYEIFQIHTRNMPLEAKYSREFVLDAIERFKRQVDDPELIKNLDFLYDEIKNSETEEEVKGAVKNLLPQEVIDELEVEITKAMLRSLADQTHGFVGADIEALCKEAAMKALRRYLPQIDLNEDEIPIELLESIRVTWDDFMDALREIEPSAMREVFVEIPKVTWNDVGGLEDVKREIIEAVEWPLKYPEKFKKFGIKPPKGVLLYGPPGTGKTLIAKAVANESEANFISIKGGQILSKWLGESEKAVRKIFRKARQVAPCIIFFDEIDAIAQMRGIDEGSRAVERVLNQLLTEMDGLEELHGVVVIGATNRPDILDPALLRPGRFDRMVYVRPPDKKSRLAIFKIHTRDMPLSEDVDLEELADLTEGYVGADIEAICREAVMLAIRENINAEKVEMRHFLEALKKIKPSVNEAMLNFYERFEEKMRTERMQVAATKPFMGYG

SEQ ID NO: 23195 - protein, 773 aa, Sulfolobus acidocaldarius
MEIELSAGAEVSPSGKKELVLRVVEAKQKDVGRGKVRIDIDLLSQIGVNPGEVVELEGQRKTAAIAWPLAPEDVLNDEDKYIIRMDGITRKNAGVSIGDKVIVRKSNPKVATSVRLAPSNFSITVDPGFISYVKKKLKDTPLVEGDTVLIPVLGQAIPFTVVQVRPQGIVIVSDETSITISEKPVEQTRYPRVTYEDIGGMKEIIQKIRELVELPLRHPELFKRLGIEPPKGILLYGPPGVGKTLLAKAVANETDAYFTSINGPEIMSKFYGESEQRLREIFEDAKKHAPAIIFIDEIDAIAPKRDEVIGEVERRVVAQLLTLMDGLENRGNVIVIAATNRPNAVDPALRRPGRFDREIEIPLPDKQGRLEILQIHTRNMPLSKDVDLHKLAEMTHGYTGADLSALVREAAMNALRRYIQMIDLSQDKIPPEILEKMEVRMDDFLKAFKDIVPSGLREIYIEVPEVHWFDIGGLEEVKEELREVVEYPLKYREVYENMSIEPPKGILLFGPPGTGKTMLAKAVATESGANFIAVRGPEILSKWVGESEKAIREIFRKARQAAPTVIFFDEIDSIAPIRGLSTDSGVTERIVNQLLAEMDGIEKLENVVVIAATNRPDILDPALLRPGRFDRLIYVPPPDKTARFEILKVHTKNVPLAEDVSLEDIAEKAEGYTGADLAAVVREAALRAIREQMAECMGEANNECKKSDIECREKKIRDCMAGKGRIVERKHFDVALKKVRPSVTQDMIQFYQNWLEKARQQLPRTNIKPSTFT

SEQ ID NO: 23196 - protein, 780 aa, Sulfolobus acidocaldarius
MRINILRVEYHSKTAHSILLQLDLFKKVKVICHMSQSIKFRVTEARQRDVGKKVARISETSMRKLNVEAGDYIEIIGQDGNSALAQVMPAYDISDDEIRIDGYIRKSIKVGIGDDVTVRKTNVSPASKVVLAPTQPIRFDNSFVEYVKDTLMDKPLAKGETLPIPIYTGTLELTVVNTQPSNYVYVTGSTNIEIREEPVKESSLAYPKVSWEDIGDLEEAKQKIREIVEWPMRHPELFQRLGIDPPKGILLYGPPGTGKTLLARALRNEIGAYFITVNGPEIMSKFYGESEQRIREIFKEAEENAPSIIFIDEIDAIAPKREDVTGEVEKRVVAQLLTLMDGIKGRGRVIVIGATNRPDAIDPALRRPGRFDREIEIRPPDTKGRKDILQVHTRNMPITDDVDLDKLAEMTYGYTGADLAALAKEAAIYALRRFVDEKKLNLDQPTIPAEIIKELKVSMNDFLNALKSIQPSLLREVYVEVPKVNWNDIGGLDNVKQQLREAVEWPLRFPELFTKSGVTPPKGILLFGPPGTGKTMLAKAVATESGANFIAVRGPEILSKWVGESEKAIREIFRKARQAAPTVIFFDEIDSIAPIRGLSTDSGVTERIVNQLLAEMDGIVPLNKVVIIAATNRPDILDPALLRPGRFDRLIYVPPPDKTARFEILKVHTKNVPLAEDVSLEDIAEKAEGYTGADLEALVREATINAMRSIYSMCDKQSRDECKGNMECYQKHIKECMNKTSFKVSKEDFEKALNVVKASLTQADIQRYERFSKELKRAIA

SEQ ID NO: 23197 - protein, 591 aa, Sulfolobus acidocaldarius
MVVSNNTNTTAIPTLLSDYSSYIILAIQVLLFIIPILFFVYYMRRMGIGVGNRKKELEAKMRNIPSVSWEQIYDMKELKQKLLDISNYVMSRKRAYGVILFGPPGTGKTSIAKALANNLKWNYFELRSSDILSKWYGESEFLLENFFNTVELNVPAIIVIDEIDGFTLRREGDIHEVTHRLVNILLNRLQDIHDKRLPVIIIGTTNLPQEIDEALLRPGRFDEIIYVPLPDEKAREEIWLGYTKGLSVDCKLLANKSNRLSPADIKEIVESVSIECSKEGREPTTQDFIRYLDNFKPSVSIQTLIKFENLSKKYSRHKLGEKPYGIANIKWDDLGDLDEIKKVIRESVELPMKNKDIANKLGIKPVKGILLYGPPGTGKTSIAKALANELQASFIVVSGDEISSVGPFKAGELIAEKFHIAKDNSPSIIFIDEIDMIARTRGENEWRGALTELLSEMDGIRENEDVIIIGATNRPWDLDPALLRAGRFDRIIYVPPPDYEGRVKVLKVLTKGLSVDEEILNKVSRMTNNYTPADLKLVVDEIRRNLLKEATSTGNIRTSLNFDDFVRVLAYIKPSVNVELLKMYEQFRVER

SEQ ID NO: 23198 - protein, 769 aa, Sulfolobus solfataricus
MSASSGEEQKPQRKELILRVMEARQKDVGRGKVRIDIDLLSQIDVSPGDVVEIEGTRKTAALAWPLSPEDTTTGEKDIIRMDGITRKNAGVSIGDKVIVRKAIVKPASTVKLAPSNFSITVDPGFISYVKKRLKEFPLVEGDTVLIPVLGQAIPFTVVQVKPAGIVLVNDDTIISISDKPVEPSRYPRVTYEDIGGMKNIIEKVRELVELPLRHPELFKRLGIEPPKGILLYGPPGVGKTLLAKAIANETDAYFTSINGPEIMSKFYGESEQRLREIFEDAKKHAPAIIFVDEIDAIAPKRDEVIGEVERRVVAQLLTLMDGLENRGNVIVIAATNRPSAVDPALRRPGRFDREIEIPLPDKQGRLEILQIHTRNMPLSKDVDLEKLADMTHGYTGADLSALVREAAMNSLRRYLPKIDLNQDKIPPEILESMEVKMEDFINAFKEIVPSGLREIYIEVPEVKWTDIGGLEEIKEELKEVVEYPLKYSELYQNSGIEPPKGILLFGPPGTGKTMLAKAVATESGANFIAVRGPEILSKWVGESEKAVREIFRKARMYAPAVIFFDEIDSIAPIRGISYDSGVTERIVNQLLAEMDGIEKLENVVVIAATNRPDILDPALLRPGRFEKLIYVPPPDKRARTEILKVHTRNIALGEDISLEDVAEKTEGYTGADLAALVREATMRAIRESMKICIDKTNENCKPTDAECRDKTMKECMKVNGVKVSLRHFEEAMRKVKPSVTQDMLQFYQNWVEKARQQLPKTTVKPSTYA

SEQ ID NO: 23199 - protein, 769 aa, Sulfolobus solfataricus
MSTSQSRIVLMSKTYFKRFGKMNNMSQQLKLRVVEARQRDVGRKVARITDYTISRLGIENGDYVEIIGPSGSALAQALIGDGIADNEIRVDGYIRRSIGVGIGDEVTVKRAQVQDATKVVLAPTQPISFSQSFVEYVKDWLMDKPISRGETISVPTYVGSIDFVVVSTQPSQSVRITGRTSLEIRQEPVKESAAVPKVTWEDIGDLEDVKEKIREIVELPMRHPEVFQHLGIEPPKGVLLYGPPGVGKTLLARALANEIGAYFTSINGPEIMSKFYGESEQRLREIFEEAEKNSPAIIFIDEIDAIAPKREEVTGEVEKRVVAQLLTLMDGIKGRGKVIVIGATNRPDAVDPALRRPGRFDREIEIRPPDAKARKEILQVHTRNMPLAEDVDLDKISEQTHGYTGADLAALAREAAMNALRRFINERKINLEQEQIPVDVLKELKVTMQDFIDAMKFIQPTLLREVYVEVPKVKWEDIGGLEEAKQQLREAVEWPLKFPEMFEKLGIRPPKGILLFGPPGTGKTMLAKAVATESGANFIAVRGPEILSKWVGESEKAVREIFRRARQTAPCVIFFDEIDSIAPMRGFTHDSGVTERIVNQLLSEMDGIQSLNRVVVIAATNRPDILDPALLRPGRFDRLIYVPPPDEKARIEILKIYTRTLPIDSSVNLEELAKKLEGYTGADIEALARETTMKVLRQKYYDCLNKAKKECKDQECTDKTIKSCMSNLEIKITMQDFLDTMKIVTPSLTKADIMRYENMVKEIKRSVIG

SEQ ID NO: 23200 - protein, 607 aa, Sulfolobus solfataricus
MIEPVLNLAIIFISLAVLVIILMKIFGKSTAKFAYSDKALQLQNKSQKKKVEIEDKKITWDDIGGYEDAKKEIREYIELPLKNKDVATKYGLKPPKGMLLFGPPGCGKTMMMRALANESKLNFLYVNISDIMSKWYGESEARLRELFNNARKNAPCILFFDEIDTIGVKRESHTGDSVTPRLLSLMLSEIDGLHSEDGVIVVGSTNVPQMLDKALLRAGRFDKLIYIGPPNKEARKQILQIHCRGKPLAEDVDFDKLAEITERYSGADLANLCQEAARKVASEAIEKGADRKITMADFIELIKKYKPSITLQMIEDYEKFRLDFERRVRKGEEENELEEKLTLNDIGGYNEIKTELKELLELQLYHYKLLEQLRVPPIRGILLYGPPGVGKTMMAKALAKTLNVKLIALSGAEIMYKGYEGAIAAIKEVFNRARENKPAIILLDELDAIASKRSYKSYGDSSKIVNQLLTEMDGIRSLKEVVVIGTTNRLKAIDPALLRPGRFDKIIHMPLPNREERLDILMKYIGKEECEKVDCGILADQTEGYSGADLAALAREAKMKVLKSILRGESNRTLTREDLIDALNKIHPSVKKRLSKGSSSNSDHETR

SEQ ID NO: 23201 - protein, 585 aa, Sulfolobus solfataricus
MATVTSNNSTIGLGLSSNTLQLIIEVILTILFFLVPLIFWIYFSRRMMIGNTTKSRKPKIHIPNIRWDEVYDLKDVKMRLEEIAKIVQEGRAYGVILFGPPGTGKTTIAKALANKLGWAYFELRPSKILSKWYGESELLLDSFFDQVEINTPAVVFIDELDSLAMSRQSDLHEVTHRLVNIMLMRLQDLHDKNLRVIIIGATNVPQEIDEAFLRPGRFDEVIYVALPDEKSREEIWKGYIKREDIDYSLLAKKSERFSPADIKNVADKVISKNNSLKTEDFLREIENYKPSIQLSTIIKFENIARKYERSKLIIKTYGIPNISWNDLGDLEEVKRIIRESIVLPITNKEFAEKLGIYPVKGILLYGPPGTGKTSIAKALANDLRFNFIELSGEEVSGAGPLDAPKIIAEKFYIALDNAPAIIFIDEIDMIARNRMTNEWRNALTELLRQMDGLREIHNVIVVGATNRPWDLDPAILRAGRFDKIIYVPPPDKDGREKILQVLIKDLIINRNIISKVAELTENYTPADLKLVVEEVKRNLLKEASISGNLRTEVKLEDFMDVLKRVKASLDRQTLIMYEKFGFERR

SEQ ID NO: 23202 - protein, 745 aa, Thermoplasma acidophilum
MESNNGIILRVAEANSTDPGMSRVRLDESSRRLLDAEIGDVVEIEKVRKTVGRVYRARPEDENKGIVRIDSVMRNNCGASIGDKVKVRKVRTEIAKKVTLAPIIRKDQRLKFGEGIEEYVQRALIRRPMLEQDNISVPGLTLAGQTGLLFKVVKTLPSKVPVEIGEETKIEIREEPASEVLEEVSRISYEDIGGLSEQLGKIREMIELPLKHPELFERLGITPPKGVILYGPPGTGKTLIARAVANESGANFLSINGPEIMSKYYGQSEQKLREIFSKAEETAPSIIFIDEIDSIAPKREEVQGEVERRVVAQLLTLMDGMKERGHVIVIGATNRIDAIDPALRRPGRFDREIEIGVPDRNGRKEILMIHTRNMPLGMSEEEKNKFLEEMADYTYGFVGADLAALVRESAMNALRRYLPEIDLDKPIPTEILEKMVVTEDDFKNALKSIEPSSLREVMVEVPNVHWDDIGGLEDVKREIKETVELPLLKPDVFKRLGIRPSKGFLLYGPPGVGKTLLAKAVATESNANFISIKGPEVLSKWVGESEKAIREIFKKAKQVAPAIVFLDEIDSIAPRRGTTSDSGVTERIVNQLLTSLDGIEVMNGVVVIGATNRPDIMDPALLRAGRFDKLIYIPPPDKEARLSILKVHTKNMPLAPDVDLNDIAQRTEGYVGADLENLCREAGMNAYRENPDATSVSQKNFLDALKTIRPSVDEEVIKFYRTLSETMSKSVSERRKQLQDQGLYL

SEQ ID NO: 23203 - protein, 375 aa, Thermoplasma acidophilum
MRVLDDIDEKIDKATKLLQGGIKEESLGHKDKAKEYYFAAYRLMLEAANASPPDLKKKRLDQCNIILSAYQRVNENRTAPAEEKTSDRISEGEALLEEIGLEKPEIPKVTFEDVAGLDDVKNEILGKIVYPMKFKELSQEYNIQFGGGMLLYGPPGTGKTFIVKAIANEVRARFINVNPASLYSQWFGMFEKNISKLFRAAALLSPSIIFFDEIDALVPKRDTSNSDAAKRGVAQLLNEVGGINSQKNKNLFIIAATNNPWEIDEAMLRPGRFDIKIYVPPPDIIARKKIFELNMAKVKQAGNIDYNLLAQQTEGYSGADIEFICKKASQNVFMEAVKSGKQRQVETRDLLDVIGSIKPSIDADLLSKYREFAGF

SEQ ID NO: 23204 - protein, 795 aa, Pyrococcus abyssi
MAEKKEVKLKVASAYQRDVGRGIVRLDRKTMRELGISPGDVVEIIGTKNTAAIAWPAYPEDEGLGIIRMDGTIRKNAGVGLGDEVTVRKAEVREAKKVTLAPTEPIRFGRDFVEWLHERLVGRPVVRGDYIKVGVLGQELTFVVTATQPSGVVQITEFTDFNISEKPVKEVEKRMTTGVTYEDIGGLKDVIEKIREMIELPLKHPELFEKLGIEPPKGVLLYGPPGTGKTLLAKAVANEANAYFIAINGPEIMSKYYGESEERLREVFKEAEENAPAIIFIDEIDAIAPKRSEVTGEVEKRVVAQLLALMDGLKSRGKVIVIGATNRPDAIDPALRRPGRFDREIEVGVPDRQGRKEILQIHTRGMPIEPDFRKDDVLKILEDFKREGKFTKIIDKAIEEVNKSKEEEIPQVLKKIDAELYDEVKTRLIDKLLDELADVTHGFVGADLAALAREAAMAALRRLIREGKIDFEAETIPREVLDELKVTRRDFYEALKMVEPSALREVLIEVPNVHWDDIGGLEDVKQELREAVEWPLKYPEAFKAYGITPPKGILLYGPPGTGKTLLAKAVATESQANFIAVRGPEILSKWVGESEKNIREIFRKARQAAPTVIFIDEIDAIAPRRGTDVNRVTDRIINQLLTEMDGIQENAGVVVIAATNRPDILDPALLRPGRFDRLILVPAPDEKARFEIFKVHTRGMPLADDVDLKELARRTEGYTGADIAAVCREAAMIAMRRALEKGIIKPGMKASEIRRLAKVTMKDFEEALRKIGPSVSKETMEYYRKIQEQFKQARG

SEQ ID NO: 23205 - protein, 840 aa, Pyrococcus abyssi
MILGRSEPQKDEIKLRVAEALKRDVGRGIVRFDRKYQRMIGVEPGDIVEIEGERITAAIVANPHPDDRGLDIIRMDGYIRKNAGVTIGDFVTIRRAEVKEAKKVVLAPAQKGVIVQIPGDIVKNNLLGRPVVKGDIIVASGRSEMYYSSGTPFDEIFRGFFEAMSVGFGELKFMVVNTIPKGIVQITYNTEVEVLPQAVEVREEKIPEVTYEDIGGLKEAIEKIREMVELPLKHPELFERLGIEPPKGVLLYGPPGTGKTLLAKAVANEANAYFIAINGPEIMSKYYGESEERLREIFKEAEENAPAIIFIDEIDAIAPKREEVVGEVEKRVVSQLLTLMDGLKSRGKVIVIAATNRPDALDPALRRPGRFDREIEVGVPDKQGRKEILQIHTRGMPIEPDFEKETVIKALKELEKDDRFDKEKIKKIIEKVSKAKSEEEIKDILREDRNLYIEVRTKLIDKLLDELAEVTHGFVGADLAALAREAAMVVLRRLIKEGKINPEAETIPREVLEELKVTKADFYEALKMVEPSALREVLIEVPNVHWDDIGGLEDVKQELREAVEWPLKYPKAFKRLGITPPKGVLLYGPPGTGKTLLAKAVATESQANFIAIRGPEVLSKWVGESEKRIREIFRKARQASPAIIFIDEIDAIAPARGTAEGEKVTDRIINQLLTEMDGLVENSGVVVIAATNRPDILDPALLRPGRFDRLILVPAPDEKARFEIFKVHTRGMPLADDVDLKELARRTEGYTGADIAAVCREAAMNALRRAVAKLSPEELEEESEKFLKSLIVTRKDFEVALKKVKPSVTKYMMEYYRQFEESRKRMVGESTGREPDYFTG

SEQ ID NO: 23206 - protein, 558 aa, Chlamydomonas reinhardtii
MGGADVQAITIAVTTGRDCAMSGDYSAGCTYYENAVELITRYVRTLGDPHAIRQWSALLKEVQDEHSSVRQCDKEARGMRVYDSVARSNSYPEMNDPRGSAAYDDGYRQPIVVCHNSGQEDPMVWRPPTRGEGRSGAPARGAPPPRARSSQDDNKLPSWANNNNGGGGGPPARGNAAGPSGRAGSAPRRPTGNAPAGNAAAGGSYDRPWRQNMQGKQGAAGPGGKPGDKGSAGEKAKKQYSGPDQELAAMLERDIVDQGTSVKWDDIAGLEEAKRVLNEALVLPMIMPDFFTGIRRPVKGVLLFGPPGTGKTMLAKAAATETSCTFFNVSSATLASKYRGESERMVRILFEMARDLAPSMIFIDEVDSLCSQRGTANEHEASRRVKTELLTQVDGVHGSEKDKEPGPDGEPPAPKHVFVLAATNFPWDIDEALRRRLEKRVYIPLPGQAQRLQLLKINLRDVAVAPDVNLEAVAGQMDGYSGDDITNVCRDAAMNGMRRLVAGKTPAEIKALREAGMTGGQEPITSDDFREALRKINPSVSKEDIKRHEEWLSVFGST

SEQ ID NO: 23207 - protein, 433 aa, Pinus taeda
MRVEELGGILKPASDLEAAANAKEKLKEKHQLPKESNRMVKHGEGLRQYYLQHIHDLQLQVRQKTHNLNRLEAQRNDLNSKVRALREELQLLQEPGSYVGEVVKVMGKSKVLVKVHPEGKYVVDVDKNIDITKITPSTRVALRNDSYVLHLILPSKVDPLVNLMKVEKVPDSTYDMIGGLDQQIKEIKEVIELPIKHPELFESLGIAQPKGVLLYGPPGTGKTLLARAVAHHTDCTFIRVSGSELVQKYIGEGSRMVRELFVMAREHAPSIIFMDEIDSIGSARMESGTGNGDSEVQRTMLELLNQLDGFEASNKIKVLMATNRIDILDQALLRPGRIDRKIEFPNPNEESRFDILKIHSRKMNLMRGIDLKKIAEKMSGASGAELKAVCTEAGMFALRERRVHVTQEDFEMAVAKVMKKETEKNMSLRKLWK

SEQ ID NO: 23208 - protein, 215 aa, Mirabilis jalapa
GSSVGDAGGAADRVLNQLLTEMDGMSAKKTVFIIGATNRPDIIDPALLRPGRLDQLIYIPLPDEDSRHQIFKAALRKSPIAKDVDIRALAKYTQGFSGADITEICQRACKYAIRENIEKDIEREKRRSENPEAMEEDVEDEVAEIKAAHFEESMKFARRSVSDADIRKYQAFAQTLQQSRGFGTEFRFANTTADTTSTDAFAAADAGADDDDLYN

SEQ ID NO: 23209 - protein, 1219 aa, Plasmodium falciparum 3D7
MNINFYVYDDEADNEIISSNFNVYCSDEFLKIHNIEKNDNAIIYHEIMRQDEEEGQEKGQEIGQEKDQEKDQKKDQNKDQKKDQNKDQKKEQARNINHINNIHININKIDDEYVEKEPKPNVQNFSVLCCFKNYNELNIKKKLENNGLCINKYILKSLNLDIKEIEEKNIYKSCKDQNNNMKKIGIFKVSIIKPQLFIPIKEIKLHVQEIFNTSYEYLKSYQYENIDLLQSFWKNIKSNNMEKYINLSLLNTCLFVNNFLKITILGVHSYITVGQIILTKDKKTKMKNNNNNNKNKTVRNMNARDKQENNKNGDNKNKNGDNNNKNGDNKNKNGDNKNKNGDNKNKNGDNKNKNGDNNNNIVVPFIDQNTKIVIISNDDIKNVVDDKHIINKYDKEKTNINSDHMKKLNLKKMVVNKKEKKGLNKLGGYNKIKEDIYYYILIPLIYKHIYDAYHIDIHKGILLHGPPGCGKTYIALLIKEELSLLKKKFCTITQNKTSKQLNNTKNDNNYNNDDNIIIPEIEILKSTDLIDYNNTGYKINELFLRCHKRYQEENKCTIIFIDEIEILCKKREENNNMNIYTSVLLNNMDGIKKHTHTILIGATNYINKIDLALRRSGRFDKEIEVNLPNLKDRISIFQKKLNLIKHNIGKKKIHKLADLCQSFTCSDINSLINISMFLNLKENKIISRDIFKTANVHTIDDTNDIKNDQTSACLEDCIEGKIGTNEMHNTKENKYINMNNNNDNDNNNDNNNDNNNDNNNGDNNNYYLTPYDKNHLYNNSLINTQSNSCHEKKMMNYNKNNLYLLRYKHLLKALKYVKPSGMKELYIDIPKTRFKDIGGYKFVKRCINECLIYPKKYKNIYDKYNIESPKGILLYGPPGCSKTLFAKAIASEIHMNFISVKGPEIFSKYVGESEKSIRNIFKKARENHPCVIFFDEIDSIAVNRNNNQNFVSNRVLCQLLNEIDGIKNRLNVIILAATNRPDLIDPALMRPGRFDRIIYVPLPNYSSRFAILKKNLKFFKIHNLIEYDKKETINDLNHNEIKRECIIQDIQYNDHPKNSNQKINNHITKSSYDHIHNYTFNKNNMNIKTNEDSSLYKHYKYTDIKFIKLCHVLAKKTKKYSGAEIVNICREASICALRQTLKKRNIKINPKIKIKIKNNETNNTQNNIAHSEKNKYPFDKEPLIGLSKKHFLRVLKKIKPQTSESLINFYKNYKEQNKV

SEQ ID NO: 23210 - protein, 810 aa, Arabidopsis thaliana
MSNEPESSDSKTKKDFSTAILERKKSPNRLVVDEAINDDNSVVSLHPTTMEKLQLFRGDTILIKGKKRKDTVCIALADETCEEPKIRMNKVVRSNLRVRLGDVISVHQCPDVKYGKRVHILPVDDTVEGVTGNLFDAYLKPYFLEAYRPVRKGDLFLVRGGMRSVEFKVIETDPAEYCVVAPDTEIFCEGEPVKREDEERLDEVGYDDVGGVRKQMAQIRELVELPLRHPQLFKSIGVKPPKGILLYGPPGSGKTLIARAVANETGAFFFCINGPEIMSKLAGESESNLRKAFEEAEKNAPSIIFIDEIDSIAPKREKTNGEVERRIVSQLLTLMDGLKSRAHVIVMGATNRPNSIDPALRRFGRFDREIDIGVPDEIGRLEVLRIHTKNMKLAEDVDLERISKDTHGYVGADLAALCTEAALQCIREKMDVIDLEDDSIDAEILNSMAVSNEHFHTALGNSNPSALRETVVEVPNVSWEDIGGLENVKRELQETVQYPVEHPEKFEKFGMSPSKGVLFYGPPGCGKTLLAKAIANECQANFISVKGPELLTMWFGESEANVREIFDKARQSAPCVLFFDELDSIATQRGNSAGDAGGAADRVLNQLLTEMDGMNAKKTVFIIGATNRPDIIDSALLRPGRLDQLIYIPLPDEDSRLNIFKACLRKSPVAKDVDVTALAKYTQGFSGADITEICQRACKYAIRENIEKDIENERRRSQNPEAMEEDMVDDEVSEIRAAHFEESMKYARRSVSDADIRKYQAFAQTLQQSRGFGSEFRFDSTAGVGRTTGVAAADPFATSAAAADDDDLYS

SEQ ID NO: 23211 - protein, 843 aa, Arabidopsis thaliana
MGNHRAYKIPSSAPLRSHSSSSSSSPIDLSRNKFPNFLLRALLKTKKDFSTAILERKKSPNRLVVDEAINDDNSVVSLHPTTMEKLQLFRGDTILIKGKKRKDTVCIALADETCEEPKIRMNKVVRSNLRVRLGDVISVHQCPDVKYGKRVHILPVDDTVEGVTGNLFDAYLKPYFLEAYRPVRKGDLFLVRGGMRSVEFKVIETDPAEYCVVAPDTEIFCEGEPVKREDEERLDEVGYDDVGGVRKQMAQIRELVELPLRHPQLFKSIGVKPPKGILLYGPPGSGKTLIARAVANETGAFFFCINGPEIMSKLAGESESNLRKAFEEAEKNAPSIIFIDEIDSIAPKREKTNGEVERRIVSQLLTLMDGLKSRAHVIVMGATNRPNSIDPALRRFGRFDREIDIGVPDEIGRLEVLRIHTKNMKLAEDVDLERISKDTHGYVGADLAALCTEAALQCIREKMDVIDLEDDSIDAEILNSMAVSNEHFHTALGNSNPSALRETVVEVPNVSWEDIGGLENVKRELQETVQYPVEHPEKFEKFGMSPSKGVLFYGPPGCGKTLLAKAIANECQANFISVKGPELLTMWFGESEANVREIFDKARQSAPCVLFFDELDSIATQRGNSAGDAGGAADRVLNQLLTEMDGMNAKKTVFIIGATNRPDIIDSALLRPGRLDQLIYIPLPDEDSRLNIFKACLRKSPVAKDVDVTALAKYTQGFSGADITEICQRACKYAIRENIEKDIENERRRSQNPEAMEEDMVDDEVSEIRAAHFEESMKYARRSVSDADIRKYQAFAQTLQQSRGFGSEFRFDSTAGVGRTTGVAAADPFATSAAAADDDDLYS

SEQ ID NO: 23212 - protein, 809 aa, Arabidopsis thaliana
MSTPAESSDSKSKKDFSTAILERKKSPNRLVVDEAINDDNSVVSLHPATMEKLQLFRGDTILIKGKKRKDTVCIALADETCEEPKIRMNKVVRSNLRVRLGDVISVHQCPDVKYGKRVHILPVDDTVEGVTGNLFDAYLKPYFLEAYRPVRKGDLFLVRGGMRSVEFKVIETDPAEYCVVAPDTEIFCEGEPVKREDEERLDDVGYDDVGGVRKQMAQIRELVELPLRHPQLFKSIGVKPPKGILLYGPPGSGKTLIARAVANETGAFFFCINGPEIMSKLAGESESNLRKAFEEAEKNAPSIIFIDEIDSIAPKREKTNGEVERRIVSQLLTLMDGLKSRAHVIVMGATNRPNSIDPALRRFGRFDREIDIGVPDEIGRLEVLRIHTKNMKLAEDVDLERISKDTHGYVGADLAALCTEAALQCIREKMDVIDLEDDSIDAEILNSMAVTNEHFHTALGNSNPSALRETVVEVPNVSWNDIGGLENVKRELQETVQYPVEHPEKFEKFGMSPSKGVLFYGPPGCGKTLLAKAIANECQANFISVKGPELLTMWFGESEANVREIFDKARQSAPCVLFFDELDSIATQRGGGSGGDGGGAADRVLNQLLTEMDGMNAKKTVFIIGATNRPDIIDSALLRPGRLDQLIYIPLPDEDSRLNIFKAALRKSPIAKDVDIGALAKYTQGFSGADITEICQRACKYAIRENIEKDIEKEKRRSENPEAMEEDGVDEVSEIKAAHFEESMKYARRSVSDADIRKYQAFAQTLQQSRGFGSEFRFENSAGSGATTGVADPFATSAAAAGDDDDLYN

SEQ ID NO: 23213 - protein, 815 aa, Arabidopsis thaliana
MANQAESSDSKGTKKDFSTAILEKKKAANRLVVDEAINDDNSVVSLHPDTMEKLQLFRGDTILIKGKKRKDTVCIALADETCDEPKIRMNKVVRSNLRVRLGDVISVHQCPDVKYGNRVHILPLDDTIEGVSGNIFDAYLKPYFLEAYRPVRKGDLFLVRGGMRSIEFKVIETDPAEYCVVAPDTEIFCEGEPIKREDEERLDEVGYDDVGGVRKQMAQIRELVELPLRHPQLFKSIGVKPPKGILLYGPPGSGKTLIARAVANETGAFFFCINGPEIMSKLAGESESNLRKAFEEAEKNAPSIIFIDEIDSIAPKREKTHGEVERRIVSQLLTLMDGLKSRAHVIVMGATNRPNSIDPALRRFGRFDREIDIGVPDEIGRLEVLRIHTKNMKLAEDVDLERVSKDTHGYVGADLAALCTEAALQCIREKMDVIDLDDEEIDAEILNSMAVSNDHFQTALGNSNPSALRETVVEVPNVSWEDIGGLENVKRELQETVQYPVEHPEKFEKFGMSPSKGVLFYGPPGCGKTLLAKAIANECQANFISIKGPELLTMWFGESEANVREIFDKARQSAPCVLFFDELDSIATQRGNSVGDAGGAADRVLNQLLTEMDGMNAKKTVFIIGATNRPDIIDPALLRPGRLDQLIYIPLPDEESRYQIFKSCLRKSPVAKDVDLRALAKYTQGFSGADITEICQRSCKYAIRENIEKDIEKERKRAESPEAMEEDEEEIAEIKAGHFEESMKYARRSVSDADIRKYQAFAQTLQQSRGFGSEFRFPDAPTGTTGAFPGAAATVGGVDPFATSGGAADDDDLYS

SEQ ID NO: 23214 - protein, 807 aa, Glycine max
MSQQGESSDPKSGKKDFSTAILERKKSPNRLVVDEAVNDDNSVVTMHPQTMEKLQLFRGDTILIKGKKRKDTICIALADENCEEPKIRMNKVVRSNLRVRLGDVVSVHQCPDVKYGKRVHILPIDDTIEGVTGNLFDAFLKPYFLEAYRPVRKGDLFLVRGGMRSVEFKVVETDPGEYCVVAPDTEIFCEGEPLKREDEERLDEVGYDDVGGVRKQMAQIRELVELPLRHPQLFKSIGVKPPKGILLYGPPGSGKTLIARAVANETGAFFFCINGPEIMSKLAGESESNLRKAFEEAEKNAPSIIFIDEIDSIAPKREKTHGEVERRIVSQLLTLMDGLKSRAHVIVIGATNRPNSIDPALRRFGRFDREIDIGVPDEVGRLEVLRIHTKNMKLSDDVDLERIAKDTHGYVGADLAALCTEAALQCIREKMDVIDLEDETIDAEVLNSMAVTNEHFQTALGTSNPSALRETVVEVPNVSWEDIGGLENVKRELQETVQYPVEHPEKFEKFGMSPSKGVLFYGPPGCGKTLLAKAIANECQANFISVKGPELLTMWFGESEANVREIFDKARQSAPCVLFFDELDSIATQRGSSVGDAGGAADRVLNQLLTEMDGMSAKKTVFIIGATNRPDIIDPALLRPGRLDQLIYIPLPDEDSRHQIFKACLRKSPIAKNVDLRALARHTQGFSGADITEICQRACKYAIRENIEKDIERERKSRENPEAMDEDTVDDEVAEIKAAHFEESMKFARRSVSDADIRKYQAFAQTLQQSRGFGSEFRFPESGDRTTTGSDPFAASAGGADEDDLYS

SEQ ID NO: 23215 - protein, 807 aa, Glycine max; identical to SEQ ID NO: 23214

SEQ ID NO: 23216 - protein, 808 aa, Glycine max
  unsure (1)..(808): unsure at all Xaa locations
MSQQGESSDPKSGKKDFSTAILERKKSPNRLVVDEAVNDDNSVVTMHPQTMEKLQLFRGDTILIKGKKRKDTICIALADENCEEPKIRMNKVVRSNLRVRLGDVVSVHQCPDVKYGKRVHILPIDDTIEGVTGNLFDAFLKPYFLEAYRPVRKGDLFLVRGGMRSVEFKVIETDPGEYCVVAPDTEIFCEGEPLKREDEERLDEVGYDDVGXGVRKQMAQIRELVELPLRHPQLFKSIGVKPPKGILLYGPPGSGKTLIARAVATETGAFFFCINGPEIMSKLAGESESNLRKAFEEAEKNAPSIIFIDEIDSIAPKREKTHGEVERRIVSQLLTLMDGLKSRAHVIVIGATNRPNSIDPALRRFGRFDREIDIGVPDEVGRLEVLRIHTKNMKLSDDVDLERIAKDTHGYVGADLAALCTEAALQCIREKMDVIDLEDETIDAEVLNSMAVTNEHFQTALGTSNPSALRETVVEVPNVSWEDIGGLENVKRELQETVQYPVEHPEKFEKFGMSPSKGVLFYGPPGCGKTLLAKAIANECQANFISVKGPELLTMWFGESEANVREIFDKARQSAPCVLFFDELDSIATQRGSSVGDAGGAADRVLNQLLTEMDGMSAKKTVFIIGATNRPDIIDPALLRPGRLDQLIYIPLPDEDSRHQIFKACLRKSPIAKNVDLRALARHTQGFSGADITEICQRACKYAIRENIEKDIERERKSRENPEAMDEDTVDDEVAEIKAAHFEESMKFARRSVSDADIRKYQAFAQTLQQSRGFGSEFRFPESGDRTTTGSDPFAASAGGADEDDLYS

SEQ ID NO: 23217 - protein, 808 aa, Glycine max
  unsure (1)..(808): unsure at all Xaa locations
MSQQGESSDPKSGKKDFSTAILERKKSPNRLVVDEAVNDDNSVVTMHPQTMEKLQLFRGDTILIKGKKRKDTICIALADENCEEPKIRMNKVVRSNLRVRLGDVLSVHQIPYVSYGKRVHILPIDDPILYFTCKLFHALLKPDFWXAESVLFKVDLLFVMXGVSGTECLAYVSVAVDXNFFKVASTLVGEGEAVKREDEKNRVEIGYDAVGSVKKEMCQIRELIKLPLRHPQLFKSIGVKPPKGILLYGPPGSGKTLIARAVANETGAFFFCINGPEIMSKLAGESESNLRKAFEEAEKNAPSIIFIDEIDSIAPKREKTHGEVERRIVSQLLTLMDGLKSRAHVIVIGATNRPNSIDPALRRFGRFDREIDIGVPDEVGRLEVLRIHTKNMKLSDDVDLERIAKDTHGYVGADLAALCTEAALQCIREKMDVIDLEDETIDAEVLNSMAVTNEHFQTALGTSNPSALRETVVEVPNVSWEDIGGLENVKRELQETVQYPVEHPEKFEKFGMSPSKGVLFYGPPGCGKTLLAKAIANECQANFISVKGXPELLTANVREIFDKARQSAPSVLFFDELDSIATQRGSSVGDAGSTVDDAVNAADRVLNQLLTEMDGMSAKKTVFIIGATNRPDIIDPALLRPGRLDQLIYIPLPDEDSRHQIFKACLRKSPIAKNVDLRALARHTQGFSGADITEICQRACKYAIRENIEKDIERERKSRENPEAMDEDTVDDEVAEIKAAHFEESMKFARRSVSDADIRKYQAFAQTLQQSRGFGSEFRFPESGDRTTTGSDPFAASAGGADEDDLYS

SEQ ID NO: 23218 - protein, 856 aa, Glycine max
MSAEPDHSASKGKVKLDNDPSGAEKRDENEVATAILKKKKKPNSLIVTDATTDDNSILALSNNTMETLQLFRGDTVLVKGKKRKDTVLIVLADDDLDDGSVRMNRVVRHNLRVKLGDVVTVNPCPDIKYAKRIAVLPMADTIEGLTGSLFDVFLAPYFREAYRPLRQGDLFTARAAMRTVEFKVVEIDPPEYGIVAQDTVIHCEGEPIQREDEEGNLNEVGYDDIGGCRKQMAQVRELVELPLRHPQLFKSIGIKPPRGILMYGPPGTGKTLMARAVANETGAFFFLINGPEIMSKMAGESESNLRKAFEEAEKNSPAIIFIDEIDSIAPKREKTNGEVERRVVSQLLTLMDGMKARSNVVVMAATNRPNSIDPALRRFGRFDREVDIGIPDPTGRLEILQIHTKNMKLADEVDLETIAAETHGYVGSDIASLCSEAAMQQIREKMDLIDLDEDTIDAEVLDSLGVTQENFRFALGVSNPSALREVAVVEVPNVRWEDIGGLEDVKRELVESVQYPVDHPEKFLKFGLSPSRGVLFYGPPGTGKTLLAKAVANECAANFISVKGPELLSMWFGESESNIRDIFDKARAAAPCVVFLDELDSIAKSRGGSQGDAGGASDRVVNQLLTEMDGMTSKKNVFVIGATNRPEQLDNALCRPGRLDTLVYVPLPDQPGRESILKAQLRKTPVAKDVDLSYIASKTHGFSGADLGFITQRAVKLAIKESISLAIEKQKEREAAEGDDTKMDEDVDEEDPVPELTKRHFEEAMSMARRSVTDTEIRRYEAFAQSMKNSAGGSAFFRFPEGGLSTTSCGNRHGDGNWLAAADSSFASNAYDTDDADGSVSRCMNEAMRLTRSWPL

SEQ ID NO: 23219 - protein, 380 aa, Glycine max
  unsure (1)..(380): unsure at all Xaa locations
MASQPESSDAKGTKRDFSTAILERKKAPNRLVVDEAVNDDNSVVALHPDTMEKLQLFRGDTILIKGKKRKDTICIALADETCEEPKIRMNKVVRNNLRVRLGDVVSVHQCPDVKYGKRVHILPVDDTIEGVTGNLFDAYLKPYFLEAYRPVRKGDLFLVRGGMRSVEFKVIETDPSEYCVVAPDTEIFCEGEPVKREDENRLDEVGYDDVGGVRQQMAQIREXXELPLRHPQLFKSIGVKPPKGILLYGPPGSGKTLIARAVANETGAFFFCINGPEIMSKLAGESESNLRKAFEEAEKNAPSIIFIDEIDSIAPKREKTHGEVERRIVSQLLTLMDGLKSRAHVIVIGATNRPNSIDPALRRFGRFDREIDIGVPDEVG

SEQ ID NO: 23220 - protein, 346 aa, Glycine max
  unsure (1)..(346): unsure at all Xaa locations
XNPSALRETVVEVPNVSWEDIGGLENVKRELQETVQYPVEHPEKFEKFGMSPSKGVLFYGPPGCGKTLLAKAIANECQANFISVKGPELLTMWFGESEANVREIFDKARGSAPCVLFFDELDSIATQRGSSVGDAGGAADRVLNQLLTEMDGMSAKKTVFIIGATNRPDIIDPALLRPGRLDQLIYIPLPDEDSRHQIFKACLRKSPVSKDVDLRALAKYTQGFSGADITEICQRACKYAIRENIEKDIERERRKRDNPEAMEEDDVEDEIAEIKAAHFEESMKYARRSVSDADIRKYQAFAQTLQQSRGFGSEFRFADSTSAGGTAAASDPFASAGGADEDDLYS

SEQ ID NO: 23221 - protein, 355 aa, Glycine max
  unsure (1)..(355): unsure at all Xaa locations
VDEFFFFVIYFLIKCLCXQVVEVPNVSWEDIGGLENVKRELQETVQYPVEHPEKFEKFGMSPSKGVLFYGPPGCGKTLLAKAIANECQANFISVKGPELLTMWFGESEANVREIFDKARQSAPCVLFFDELDSIATQRGSSVGDAGGAADRVLNQLLTEMDGMSAKKTVFIIGATNRPDIIDPALLRPGRLDQLIYIPLPDEDSRHQIFKACLRKSPVAKNVDLRTLARHTQGFSGADITEICQRACKYAIRENIEKAIERERKSKENPEAMDEDTVDDEVAEIKAAHFEESMKFARRSVSDADIRKYQAFAQTLQQSRGFGSEFRFPESGDRTTTGSDPFATSAGGADEDDLYS

SEQ ID NO: 23222 - protein, 356 aa, Glycine max
  unsure (1)..(356): unsure at all Xaa locations
VDEFFFFVIYFLIKCLCXQVVEVPNVSWEDIGGLENVKRELQETVQYPVEHPEKFEKFGMSPSKGVLFYGPPGCGKTLLAKAIANECQANFISVKGPELLTMWFGESEANVREIFDKARQSAPCVLFFDELDSIATQRGSSVGDAGGAADRVLNQLLTEMDGMSAKKTVFIIGATNRPDIIDPALLRPGRLDQLIYIPLPDEDSRHQIFKACLRKSPVAXNVDLRTLARHTQXGFSGADITEICQRACKYAXRETIEKAIEHERKRRETPEAMDEDMEGENVSKIKAAHFEKSMKYARRSVSDADIRKYQAFAQTLQQSRGFGSDFNFPAAVSRTXXGFEPFATFAGGADENDLYS

SEQ ID NO: 23223 - protein, 346 aa, Glycine max
  unsure (1)..(346): unsure at all Xaa locations
XNPSALRGPVLLTPWVGGGEAGGREIVDRARRAAPRVPFVHPLKFEKFGMSPSKGVLFYGPPGCGKTLLAKAIANECQANFISVKGPELLTMWFPAREANVREIFDKARGSAPCVLFFDELDSIATQRGSSVGDAGGAADRVLNQLLTEMDGMSAKKTVFIIGATNRPDIIDPALLRPGRLDQLIYIPLPDEDSRHQIFKACLRKSPVSKDVDLRALAKYTQGFSGADITEICQRACKYAIRENIEKDIERERRKRDNPEAMEEDDVEDEIAEIKAAHFEESMKYARRSVSDADIRKYQAFAQTLQQSRGFGSEFRFADSTSAGGTAAASDPFSSAGGADEDDLYN

SEQ ID NO: 23224 - protein, 805 aa, Capsicum annuum
MTDQAESSDSKNAKKDFSTAILERKKAANRLVVDEAVNDDNSVVALHPATMEKLQLFRGDTILIKGKKRKDTVVIALADETCDEPKIRMNKVVRSNLRVRLGDVVSVHQCPDVKYGKRVHILPIDDTIEGLTGDLFDAFLKPYFLEAYRPLRKGDNFLVRGGMRSVEFKVIETDPGEYCVVAPDTEIFCEGEPVKREDEERLDEVGYDDVGGVRKQMAQIRELVELPLRHPQLFKSIGVKPPKGILLYGPPGSGKTLIARAVANETGAFFFCINGPEIMSKLAGESESNLRKAFEEAEKNAPSIIFIDEIDSIAPKREKTHGEVERRIVSQLLTLMDGLKSRAHVIVMGATNRPNSIDPALRRFGRFDREIDIGVPDEVGRLEVLGIHTKNMKLAEEVDLERISKDTHGYVGADLAALCTEAALQCIREKMDVLDLEDDTIDAEVLNSMAVTNEHFQTALGTSNPSALRETVVEVPNVSWEDIGGLENVKRELQETVQYPVEPPEKFEKFGMSPSKGVLFYGPPGCGKTLLAKAIANECQANFISVKGPELLTMWFGESEANVREIFDKARQSAPCVLFFDELDSIATQRGSSSGDAGGAADRVLNQLLTEMDGMNAKKTVFIIGATNRPDIIDPALLRPGRLDQLIYIPLPDEDSRHQIFKACLRKSPLSKDIDLRALAKHTQGFSGADVTEICQRACKYAIRENIEKDIEREKRRQENPDSMDEDVDEVPEIKPAHFEESMKYARRSVSDADIRKYQAFAQTLQQSRGFGTEFRFADTSGGATAAADPFATSNAAADDDDLYS

SEQ ID NO: 23225 - protein, 793 aa, Dictyostelium discoideum
MATIEDTSKDNNNPILERKKAPNRLFVEEAINDDNSVVTLNPETMDQLQFFRGDTLLIKGKKRRDTVCIVLSDPTIDPSKIRMNKVVRNNLRVRLGDMISVHQCSDVKYGKRIHVLPIDDTIEGLSGNLFDLYLKPYFLEAYRPVRKGDLFLVRGGMRAVEFKVVETDPGEYCIVAPETFIHCEGEAVKREDEDRLDEVGYDDIGGVRKQLGQIRELVELPLRHPQLFKNIGVKPPKGILLYGPPGCGKTMIARAVANETGAFFFLINGPEIMSKLAGESESNLRKAFEEAEKNAPSIIFIDEIDSIAPKREKTQGEVERRIVSQLLTLMDGLKSRAHVIVMGATNRPNSIDPALRRFGRFDREIDITIPDATGRLEIMRIHTKNMKLDETVDLEAVANETHGYVGADLAALCTESALQCIREKMDVIDLEDETISAEILESMSVTQDHFRTALTLSNPSALRETVVEVPTTTWEDIGGLEGVKRELRETVQYPVEHPEKFRKFGMQPSKGVLFYGPPGCGKTLLAKAIANECQANFISIKGPELLTMWFGESEANVRELFDKARQAAPCVLFFDELDSIARSRGSSQGDAGGAGDRVINQILTEMDGMNAKKNVFIIGATNRPDIIDPAILRPGRLDQLIYIPLPDLPSRVAILKACLNKSPVAKDVDLEFLGQKTQGFSGADLTEICQRACKLAIRESIEKDIESTKARQESGDTKMEDDSVDPVPEITRDHFQEAMRSARRSVSDNDIRKYESFAQTLVQSRGLGNNFKFPDQESSGQFNQDQSDDLFSN

SEQ ID NO: 23226 - protein, 738 aa, Dictyostelium discoideum
MTVKPEFIFNENVQYNQIKCNTKTIESLKLSSYQYIKLFISDKHCLIVEVIPDVTIEDNTILLSNQIINKIGNKNQINRYSFNFEPIEIISNNNNNKNKNNVTITIKNINSPYNGKILNNSIKRFFSYKPIIKDCEYLCPMVGNMCIFRVVDIKRNNNNSNNNNNNYGDNDSSFEHIQEFLENNNNINEIIIMDDNTPENKELNIELIDIKEQVEQLSEFLKLKFNTSFSNNNNKYSNQLNFLKSKGILIDGPEGTSKLQLIEYIAQQYNYKYLNLNELVNGGSGGGGGEQLNSKEPMIYILNNLDSIVGKISDNENSYQKKVIQRLTNFIDHIKSNEIILSTCTSVENIDQSITRAGRIDKFIHLTIPTQSKRMLILSNLLKNTPLQYDTNNNNDDIDQCKIKDKEQFIVELSKITPGFLFKDLTKLCRTVSLLTVSSFEEEEEEENENEKEIKISFKIFKEALKFIKPSTLINFDVTVQNVKWDRIGGYKQVKERFRQLIEWPLKYQDTFKRLSLNNSSGLLLHGPSGCGKSLMVKAIATEMSINFISIKGSDIYSKWLGESERIIRDLFKSARLSSPCIMFFDEIDSLTLSRGSGDDNEDGGTSKRILSQLLNEMDGIQVKSQIFLIGCTNSIQSIDSALLRPGRFESLIHIDLPSLDDRLDILNVLSTNSLNFNKDEITQQVWLDIATQTSGFTGSQLYDLCNQAGIIQLETDIVNSQSISKQSLYESLNKLKN

SEQ ID NO: 23227 - protein, 452 aa, Dactylis glomerata
MAQEEKEKPDESTSSRRPQAKETKPNPAPEPEPEMATVAMDISKPPPAAAGDDSAKGARAGGEGLRQYYLQHIHDLQLQIRTKTHNLNRLEAQRNDLNSKVRALREELQLLQEPGSYVGEVVKVMGKSKVLVKVHPEGKYVVDIDKSIDITKITPSTRVALRNDSYMLHLILPSKVDPLVNLMKVEKVPDSTYDMIGGLDQQIKEIKEVIELPIKHPELFESLGIAQPKGVLLYGPPGTGKTLLARAVAHHTDCTFIRVSGSELVQKYIGEGSRMVRELFVMAREHAPSIIFMDEIDSIGSARMESGTGNGDSEVQRTMLELLNQLDGFEASNKIKVLMATNRIDILDQALLRPGRIDRKIEFPNPNEDSRGDILKIHSTTMNLMRGIDLKKIAGKMNGASGAELKAVCTEAGMFALRERRVHVTQEDFEMAVAKVMKKDNEKNMSLRKLWK

SEQ ID NO: 23228 - protein, 809 aa, Oryza sativa
  unsure (1)..(809): unsure at all Xaa locations
MASQGEPSSSSDPKGKKDFSTAILERKKSPNRLVVDEATNDDNSVIGMHPDTMEKLQLFRGDTVLLKGKKRKDTICIVLADDTCEEPKIRMNKVVRKNLRVRLGDVVSVHQCPDVKYGKRVHILPIDDTVEGITGNLFDAFLKPYFLEAYRPLRKGDLFLVRGGMRSVEFKVIETDPAEYCIVAPDTEIFCDGEPIKREDEERLDEVGYDDVGXGVRKQMAQIRELVELPLRHPQLFKSIGVKPPKGILLYGPPGSGKTLIARAVANETGAFFFLINGPEIMSKLAGESESNLRKAFEEAEKNAPSIIFIDEIDSIAPKREKTNGEVERRIVSQLLTLMDGLKARSHVIVMGATNRPNSIDPALRRFGRFDREIDIGVPDEVGRLEVLRIHTKNMKLAEDVDLEHIAKDTHGYVGADLAALCTEAALQCIREKMDIIDLEDETIDAEILNSMAVTNDHFKTALGTSNPSALRETVVEVPNVSWEDIGGLENVKRELQETVQYPVEHPEKFEKFGMSPSKGVLFYGPPGCGKTLLAKAIANECQANFISVKGPELLTMWFGESEANVREIFDKARQSAPCVLFFDELDSIATQRGSSVGDAGGAADRVLNQLLTEMDGMNAKKTVFIIGATNRPDIIDPALLRPGRLDQLIYIPLPDEQSRLQIFKACLRKSPVAKDVDLNALAKYTQGFSGADITEICQRACKYAIRENIEKDIERERRSKENPEAMEEDEVDDIAEIKAAHFEESMKYARRSVSDADIRKYQAFAQTLQQSRGFGSEFRFERTEAGAGAAADPFASAAAVADDDDLYS

SEQ ID NO: 23229 - protein, 806 aa, Oryza sativa
  unsure (1)..(806): unsure at all Xaa locations
MASQGEPSSSADPKGKKDYSTAILERKKSPNRLVVDEATNDDNSVVALHPDTMERLQLFRGDTVLLKGKKRKDTICIVLADETCEEPKIRMNKVVRKNLRVRLGDVVSVHQCQDVKYGKRVHILPIDDTVEGITGNLFDAFLKPYFLEAYRPVRKGDLFLVRGGMRSVEFKVIETDPTEYCIVAPDTEIFCDGEPIKREDEERLDEVGYDDVGGVRKQMAQIRELVELPLRHPQLFKSIGVKPPKGILLYGPPGSGKTLIARAVANETGAFFFLINGPEIMSKLAGESESNLRKAFEEAEKNAPSIIFIDEIDSIAPKREKTHGEVERRIVSQLLTLMDGLKARSHVIVMGATNRPNSIDPALRRFGRFDREIDIGVPDEVGRLEVLRIHTKNMKLAEDVDLEHIAKDTHGYVGADLAALCTEAALQCIREKMDIIDLEDETIDAEILNSMAVTNDHFKTALGTSNPSALRETVVEVPNVSWEDIGGLENVKRELQETVQYPVEHPEKFEKFGMSPSKGVLFYGPPGCGKTLLAKAIANECQANFISVKGPELLTMWFGESEANVREIFDKARQSAPCVLFFDELDSIATQRGSSVGDAGGAADRVLXVTEXDGMNAKKTVFIIGATNRPDIIDPALLRPGRLDQLIYIPLPDEQSRLQIFKACLRKSPVAKDVDLNALAKYTQGFSGADITEICQRACKYAIRENIEKDIERERRSKENPEAMEEDEVDDIAEIKAAHFEESMKYARRSVSDADIRKYQAFAQTLQQSRGFGSEFRFERTEAGAGAAADPFASAAAVADDDDLYS

SEQ ID NO: 23230 - protein, 838 aa, Oryza sativa
  unsure (1)..(838): unsure at all Xaa locations
YGFHRDIXXKTADNINQVFEVTVFALLIKNRKIPELVRRGLGKGKKDFSTAILERKKSPNRLVVDEATNDDNSVIGMHPDTMEKLQLFRGDTVLLKGKKRKDTICIVLADDTCEEPKIRMNKVVRKNLRVRLGDVVSVHQCPDVKYGKRVHILPIDDTVEGITGNLFDAFLKPYFLEAYRPLRKGDLFLVRGGMRSVEFKVIETDPAEYCIVAPDTEIFCDGEPIKREDEERLDEVGYDDVGGVRKQMAQIRELVELPLRHPQLFKSIGVKPPKGILLYGPPGSGKTLIARAVANETGAFFFLINGPEIMSKLAGESESNLRKAFEEAEKNAPSIIFIDEIDSIAPKREKTHGEVERRIVSQLLTLMDGLKARSHVIVMGATNRPNSIDPALRRFGRFDREIDIGVPDEVGRLEVLRIHTKNMKLAEDVDLEHIAKDTHGYVGADLAALCTEAALQCIREKMDIIDLEDETIDAEILNSMAVTNDHFKTALGTSNPSALRETVVEVPNVSWEDIGGLENVKRELQETVQYPVEHPEKFEKFGMSPSKGVLFYGPPGCGKTLLAKAIANECQANFISVKGPELLTMWFGESEANVREIFDKARQSAPCVLFFDELDSIATQRGSSVGDAGGAADRVLNQLLTEMDGMNAKKTVFIIGATNRPDIIDPALLRPGRLDQLIYIPLPDDQSRLQIFKACLRKSPVAKDVDLNALAKYTQGFSGADITEICQRACKYAIRENIEKDIEMEKRRKDNPEAMEEDEVDDIAEIKAAHFEESMKYARRSVSDADIRKYQAFAQTLQQSRGFGTEFRFADQPASGAGAAADPFASAAAAADDDDLYS

SEQ ID NO: 23231 - protein, 811 aa, Oryza sativa
HVGPTLSQLGTGPPPSSGKKDFSTAILERKKSPNRLVVDEATNDDNSVIGMHPDTMEKLQLFRGDTVLLKGKKRKDTICIVLADDTCEEPKIRMNKVVRKNLRVRLGDVVSVHQCPDVKYGKRVHILPIDDTVEGITGNLFDAFLKPYFLEAYRPLRKGDLFLVRGGMRSVEFKVIETDPAEYCIVAPDTEIFCDGEPIKREDEERLDEVGYDDVGGVRKQMAQIRELVELPLRHPQLFKSIGVKPPKGILLYGPPGSGKTLIARAVANETGAFFFLINGPEIMSKLAGESESNLRKAFEEAEKNAPSIIFIDEIDSIAPKREKTHGEVERRIVSQLLTLMDGLKARSHVIVMGATNRPNSIDPALRRFGRFDREIDIGVPDEVGRLEVLRIHTKNMKLAEDVDLEHIAKDTHGYVGADLAALCTEAALQCIREKMDIIDLEDETIDAEILNSMAVTNDHFKTALGTSNPSALRETVVEVPNVSWEDIGGLENVKRELQETVQYPVEHPEKFEKFGMSPSKGVLFYGPPGCGKTLLAKAIANECQANFISVKGPELLTMWFGESEANVREIFDKARQSAPCVLFFDELDSIATQRGSSVGDAGGAADRVLNQLLTEMDGMNAKKTVFIIGATNRPDIIDPALLRPGRLDQLIYIPLPDDQSRLQIFKACLRKSPVAKDVDLNALAKYTQGFSGADITEICQRACKYAIRENIEKDIEMEKRRKDNPEAMEEDEVDDIAEIKAAHFEESMKYARRSVSDADIRKYQAFAQTLQQSRGFGTEFRFAEPASGAGAAADPFASAAAAADDDDLYS

SEQ ID NO: 23232 - protein, 316 aa, Oryza sativa
AFVETVQYPVEHPEKFEKFGMSPSKGVLFYGPPGCCKTLLAKAIANECQANFISVKGPELLTMWFGESEANVREIFDKARQSAPCVLFFDELDSIATQRGSSVGDAGGAADRVLNQLLTEMDGMNAKKTVFIIGATNRPDIIDPALLRPGRLDQLYLLPLPDDQSRLQIFKACLRKSPVAKDVDLNALAKYTQGFSGADITEICQRACKYAIRENIEKDIEMEKRRKDNPEAMEEDEVDDIAEIKAAHFEESMKYARRSVSDADIRKYQAFAQTLQQSRGFGTEFRFADQPASGAGAAADPFASAAAAADDDDLYS

SEQ ID NO: 23233 - protein, 475 aa, Oryza sativa
  unsure (1)..(475): unsure at all Xaa locations
TVDLPXRHERLFHSLLTEPRKGILLSGPPGTGKTSLATSCAYDEGVNLFTINGPEIISQYYGESEQALYDVFSSAKQAAPAVIFIDELDAIAPERKDGSEELSIRIVVTLLKLIDAMSPRDRVLVIAATNRPDSIDPALKRPERLDRKIEIGVPSPVQRLDILQHLLVGVQHSLSCEQLESLASATHGFVGADLAALCNEAALSALRRYISLKKKNNGSSGKKDDLLLLVTTEDFEKAKIKVRPSAMREVSLELPKIRWEDVGGQVRIKEQLIEAIELPQKNPKAFENMGVSPPRGLLMIGPPGCSKTLMARAVASEAKLNFLAVKGPELFSKWVGDSEKAVRSLFAKARDNAPAILFFDEIDGLAVTRGRENDSAVGDRVLSQLLVEMDGLEQRIGVTVIAATNRPDKIDCALLRPGRFDRLLDVQPPDEADRVDIFRIHTRNMPCSHDVNLNELARLTEGYTGADIKLVCREA

SEQ ID NO: 23234 - protein, 858 aa, Triticum aestivum
  unsure (1)..(858): unsure at all Xaa locations
MLISFKLKKKKKKTQRPGERRTQAPKPSAPPTTPGSARHGDPQPAAAPAGRALLLRRSXKAKKDYSTAILERKKSPNRLVVDEATNDDNSVVALHPDTMERLQLFRGDTVLLKGKKRKDTICIVLADDTCEEPKVRMNKTVRKNLRVRLGDVVSVHQCPDVKYGKRVHILPIDDTVEGITGNLFDAFLKPYFLEAYRPLRKGDLFLVRGGMRSVEFKVIETDPAEYCIVAPDTEIFCDGEPVKREDEERLDDVGYDDVGGVRKQMAQIRELVELPLRHPQLFKSIGVKPPKGILLFGPPGSGKTLIARAVANETGAFFFLINGPEIMSKLAGESESNLRKAFEEAEKNAPSIIFIDEIDSIAPKREKTNGEVERRIVSQLLTLMDGLKSRAHVIVMGATNRPNSIDPALRRFGRFDREIDIGVPDEVGRLEVLRIHTKNMKLAEDVELEHISRDTHGYVGADLAALCTEAALQCIREKMDIIDLEDETIDAEILNSMAVTNDHFKTALTTSNPSALRETVVEVPNVSWEDIGGLENVKRELQETVQYPVEHPEKFEKFGMSPSKGVLFYGPPGCGKTLLAKAIANECQANFISIKGPELLTMWFGESEANVREIFDKARGSAPCVLFFDELDSIATQRGSSVGDAGGAADRVLNQLLTEMDGMNAKKTVFIIGATNRPDIIDPALLRPGRLDQLIYIPLPDVESRHQIFKACLRKSPLAKDIDLSALAKYTQGFSGADITEICQRACKYAIRENIEKDIERERRRKDNPEAMEEDEVDEVAEIRAAHFEESMKYARRSVSDADIRKYQAFAQTLQQSRGFGSEFRFPDXAGRGXXASAAAADPFASAAAAAEDDDLYS

SEQ ID NO: 23235 - protein, 820 aa, Triticum aestivum
  unsure (1)..(820): unsure at all Xaa locations
MATPNPPPPQQDEPSSSADPKAKKDYSTAILERKKSPNRLVVDEATNDDNSVVALHPDTMERLQLFRGDTVLLKGKKRKDTICIVLADDTCEEPKVRMNKTVRKNLRVRLGDVVSVHQCPDVKYGKRVHILPIDDTVEGITGNLFDAFLKPYFLEAYRPLRKGDLFLVRGGMRSVEFKVIETDPAEYCIVAPDTEIFCDGEPVKREDEERLDDVGYDDVGGVRKQMAQIRELVELPLRHPQLFKSIGVKPPKGILLFGPPGSGKTLIARAVANETGAFFFLINGPEIMSKLAGESESNLRKAFEEAEKNAPSIIFIDEIDSIAPKREKTNGEVERRIVSQLLTLMDGLKSRAHVIVMGATNRPNSIDPALRRFGRFDREIDIGVPDEVGRLEVLRIHTKNMKLAEDVELEHISRDTHGYVGADLAALCTEAALQCIREKMDIIDLEDETRAAGLXLDAAGVDRIHVNSALMTSNLSASRENDIAVLDNFKRDLRGRNNVKREWQETDLYPVEHLENFEKFGMSPSKGVLFYGPPGCGKTLLAKAHANECQANFISIKGPELLTMWFGESEANVREIFDKARGSAPCVLFFDELDSIATQRGSSVGDAGGAADRVLNQLLTEMDGMNAKKTVFIIGATNRPDIIDPALLRPGRLDQLIYIPLPDVESRHQIFKACLRKSPLAKDIDLSALAKYTQGFSGADITEICQRACKYAIRENIEKDIERERRRKDNPEAMEEDEVDEVAEIRAAHFEESMKYARRSVSDADIRKYQAFAQTLQQSRGFGSEFRFPDXAGRGXXASAAAADPFASAAAAAEDDDLYS

SEQ ID NO: 23236 - protein, 576 aa, Triticum aestivum
  unsure (1)..(576): unsure at all Xaa locations
XAFKSIGVKPXKGILLFGPPGSGKTLIARAVANETGAFFFLINGPEIMSKLAGESESNLRKAFEEAEKNAPSIIFIDEIDSIAPKREKTNGEVERRIVSQLLTLMDGLKSRAHVIVMGATNRPNSIDPALRRFGRFDREIDIGVPDEVGRLEVLRIHTKNMKLAEDVELEHISRDTHGYVGADLAALCTEAALQCIREKMDIIDLEDETIDAEILNSMAVTNDHFKTALTTSNPSALRETVVEVPNVSWEDIGGLENVKRELQETVQYPVEHPEKFEKFGMSPSKGVLFYGPPGCGKTLLAKAIANECQANFISIKGPELLTMWFGESEANVREIFDKARGSAPCVLFFDELDSIATQRGSSVGDAGGAADRVLNQLLTEMDGMNAKKTVFIIGATNRPDIIDPALLRPGRIHQLIYIPLPDVESRHQIFRGCLXLLLHGPGYYADQLPREEAQEAGDLGRELPWQELQGQQVLEKDIERDMRRKDHPQVVGRVGVDEVAEIRAAHFEESMKYARRSVSDADIRKYQAFAQTLQQSRGFGSEFRFPDQPAAGASSAAAADPFASAAAAADDDDLYS

SEQ ID NO: 23237 - protein, 772 aa, Novosphingobium aromaticivorans
MADAATEARTEGRTVRLQVAGARQEESGHGIARISRHVMSQLGVTEGDVIEIVGKRATAARVIQPYPEDEGLELIRLDGLQRANADVGSGEHVEVRKIDSRPAQRVVFAPAQKDLRLQGPAVALKRNFAGRPLVTGDLVATAGQQQVNRTDMPPQLRQMLNAPAFALTQIRLTVVSTSPKGVVHIDENTEVELRPEYEEPRSSRADVNYDDVGGMGDTIRQLREMVELPLRYPELFTRLGVDPPKGVLLHGPPGTGKTRLARAVANESDASFFTINGPEIMGSAYGESEKRLREVFEEATANSPSIIFIDEIDSIAPKRSEVHGEAEKRLVAQLLTLMDGLHSRSNLVVIAATNRPDAIDEALRRPGRFDREIVVGVPDESGRREILGIHTRGMPLAEDVDLQELARTTHGFVGADLAALAREAAIEAVRRIMPRLDFEQQTIPQDVLDSLRVERDDFLEALKRVQPSAMREVMVQAPTIGWADIGGLDEAQEKLREGVELPLKNPEAFHRLGIRPAKGFLLYGPPGTGKTLLAKAVAKEAEANFIAIKSSDLLSKWYGESEQQIARLFARARQVAPCVVFIDEIDSLVPARGSGQGEPNVTARVVNTILAEMDGLEELQSVVLIGATNRPNLVDPALLRPGRFDELVYVGTPSMSGREHILGIHTRNMPLAPDVDLALVARATDRFTGADLEDVVRRAGLNAIRRGGGNVDQVKASDFDEALEDSRATVTEQMEEEYGRMKGELKKRAMNPGPLGFIVPGMVQPTRESKHG

SEQ ID NO: 23238 - protein, 815 aa, Schizosaccharomyces pombe
MNAPSTMTDKKPEVEHLQGENPPKDTYSAEDTATAILRKKRKPNSLVVDDATNDDNSVITLSSNTMETLQLFRGDTVVVKGKRRKDTVLIVLTDEEMEDGVARINRVVRNNLRVRLGDIVTINPCPDIKYAERISVLPLADTVEGLTGSLFDVYLKPYFVEAYRPIRKGDLFVVRGSMRQVEFKVVDVAPDEFGIVSQDTIIHWEGEPINREDEESSLAEVGYDDIGGCRRQMAQIRELVELPLRHPQLFKSIGIKPPRGILMYGPPGTGKTLMARAVANETGAFFFLINGPEIMSKMAGESESNLRKAFEEAEKNSPAIIFIDEIDSIAPKREKTNGEVERRVVSQLLTLMDGMKARSNVVVMAATNRPNSIDPALRRFGRFDREVDVGIPDPTGRLEILRIHTKNMKLADDVDLEQIAAETHGYVGSDLASLCSEAAMQQIREKMDMIDLDEDEIDAEVLDSLGVTMDNFRFALGSSNPSALRETVVEVPNVRWEDIGGLEEVKRELRETVQMPVMYAEKFLRFGVTPSKGVLFFGPPGTGKTLLAKAIANECSANFISVKGPELLSMWFGESESNVRDIFDKARAAAPCVVFLDELDSIAKARGASAGDSGGGDRVVNQLLTEMDGVNSKKNVFVIGATNRPDQIDPALMRPGRLDQLIYVPLPDEEARFSILQTQLRHTPVAEDVDLRAVAKATHGFSGADLEFVVQRAVKLAIKDSIEEDIKRENETGEAPADDVVMDEDASVSQVQRHHVEEAMKMARRSVSDAEVRRYEAYAHQLLTSRGLTGFQFDSADSNTNGPSFGNDGADDLYA

SEQ ID NO: 23239 - protein, 418 aa, Schizosaccharomyces pombe
MNAPSTMTDKKPEVEHLQGENPPKDTYSAEDTATAILRKKRKPNSLVVDDATNDDNSVITLSSNTMETLQLFRGDTVVVKGKRRKDTVLIVLTDEEMEDGVARINRVVRNNLRVRLGDIVTINPCPDIKYAERISVLPLADTVEGLTGSLFDVYLKPYFVEAYRPIRKGDLFVVRGSMRQVEFKVVDVAPDEFGIVSQDTIIHWEGEPINREDEESSLAEVGYDDIGGCRRQMAQIRELVELPLRHPQLFKSIGIKPPRGILMYGPPGTGKTLMARAVANETGAFFFLINGPEIMSKMAGESESNLRKAFEEAEKNSPAIIFIDEIDSIAPKREKTNGEVERRVVSQLLTLMDGMKARSNVVVMAATNRPNSIDPALRRFGRFDREVDVGIPDPTGRLEILRIHTKNMKLADDVDLEQ

SEQ ID NO: 23240 - protein, 432 aa, Schizosaccharomyces pombe
DREVDVGIPDPTGRLEILRIHTKNMKLADDVDLEQIAAETHGYVGSDLASLCSEAAMQQIREKMDMIDLDEDEIDAEVLDSLGVTMDNFRFALGSSNPSALRETVVEVPNVRWEDIGGLEEVKRELRETVQMPVMYAEKFLRFGVTPSKGVLFFGPPGTGKTLLAKAIANECSANFISVKGPELLSMWFGESESNVRDIFDKARAAAPCVVFLDELDSIAKARGASAGDSGGGDRVVNQLLTEMDGVNSKKNVFVIGATNRPDQIDPALMRPGRLDQLIYVPLPDEEARFSILQTQLRHTPVAEDVDLRAVAKATHGFSGADLEFVVQRAVKLAIKDSIEEDIKRENETGEAPADDVVMDEDASVSQVQRHHVEEAMKMARRSVSDAEVRRYEAYAHQLLTSRGLTGFQFDSADSNTNGPSFGNDGADDLYA

SEQ ID NO: 23241 - protein, 809 aa, Schizosaccharomyces pombe
MSVAIKFTVKINDGSLRRQQTRHVFLSPAALNRLKLSPSQVIYLKHKGGEAVGITQSVKGNGIGPFEILISPLLAKWANLKAFQRVNISQYVHPLKEAEGIKIVASLSSNNEPIPESLIRKELLEIRYLHPGMIVMGESPMNMAKSGSKNLSSENMATEIFEINSGLSAQSGTEVGSSQSSPSVNESEPKATEDLDELSPGSYKVKEIHIRSPSNLIEAISDMSLDEPRIYKFTAASSMEIETPDLLKLPHEDRTQSAYNQGSEETQNFDGPPSAVTFSSIGGLQAQIAQIRDIVELPFQNPELFKFFNIMPPRGVLLYGPPGTGKTMVMRAVAAEANAQVFTIDGPSVVGKYLGETESRLRKIFEDARAHQPSIIFIDEIDALAPKRTEDVSEAESRAVATLLTLLDGMANAGKVVVIAATNRPNSIDEALRRPGRLEKEIEIGIPDKSARLDIIKLLLSGVPNEINDAQLEDLASRTHAYVGADLAAVVREAALRAIKRTISLQKDTSGLDIFGAVQMDDLEFALSSVRQSAMREFMMESPNVHWSDIGGQEEVKQKLKESVEWPLTHGETFSRLGVRPPKGVLLYGPPGCSKTITAKAIATETGLNFIAVKGPELFDKFVGESERAVRQVFQKARQASPSVIFFDEIDALTANRGEDNSSDRVVAALLNELDGIEALRNVLVLAATNRPDMIDPALMRPGRLDRLLYVGPPNFEARKQIVKIQAEKMKFAEDVDLDLIAEKTEGCSGAEVVALCQEAGLIAMHEDLEAKEICQAHFKTALLALRKAITRDMLEYYASFSESVTSIS

SEQ ID NO: 23242 - protein, 779 aa, Schizosaccharomyces pombe
MRRSGTSLSRDLERKIHERLVSLKDTIQQTEIEEWPVSTRRAIQFVQERDMSLRRIKKPILEKVVEKVLDTLKAEVEEKLASSQDLVLVDSDMEEQSDSNLMEVKDTNVINKSITSLWSSPNLKEIDGEDEKKSVGQESITGSAKRKDRRSKTNGSKRQKAEANREPPSDISLSDIGGLDDCINELLELVAMPIKHPEVYQYTGIHPPRGVLLHGPPGCGKTMLANALANELGVPFISISAPSIVSGMSGESEKKVREVFEEAKSLAPCLMFIDEIDAVTPKRESAQREMERRIVAQFLTCMDELSFEKTDGKPVLVIGATNRPDSLDSALRRAGRFDREICLTVPSQDAREKILRTMAKGLKLSGDFDFRQLAKQTPGYVGADLKALTAAAGIIAIKRIFNEISPLNKLDLNSDPRFNELDSDMALDSNDSLPLDHSSIIQRYLNAHPDPLSPEELEPLAICPQDFIEALAKVQPSSKREGFATVPGVSWNNIGALKSIRVELQMAIVQPIKRPELYQSVGISAPTGVLLWGPPGCGKTLLAKAVANESKANFISIRGPELLNKYVGESERAVRQVFLRARASSPCVIFFDELDAMVPRRDDSLSEASSRVVNTLLTELDGLSDRSGVYVIAATNRPDIIDPAMLRPGRLDKTLLVDLPDAHERVEILKTLTKQTPLHEEVNLDVLGRDERCSNFSGADLAALVREAAVTALRSAVFADIASNEPEITQHSALEPIRVTNADFELAFKNIKPSVSDRDRQKYQRLAKRWSSASTNDAD

SEQ ID NO: 23243 - protein, 948 aa, Schizosaccharomyces pombe
MENRICTLAKPLPKLDESKQAWVSYLWLKKALPGFEEHSAYVYMTTNPTIAGRIFLPINNEDLEDGTVEISGYDNLLADALYISTIAPVKLDFVQLIVIDDNSQDQDAIIERIKGRNAILMESDFINQNILVQVCQPVRHGVVDSETKFVIERKDSFTFLASNEKNISSFKRGKTETDAELVIRPSKVHTEIQWCLQNCSLIHVPFELLFNVGKKNGCPISLRLSDGKNVYGIASIKSDTEHDSVQLSPSLHYFDEFNESVISEEGTEAFLVARGPSVGIASRISLRTIPTQSCFSEKLLKAANLCVVQQVKQKVFLQSKQIFCVPINSLMANSDSVDILELTRNTDAYIWYSVEEIDPLNTYNIYYTNEDTSIVLDTQLSHRLLPSLRKPLLNFVKVHPPSQKLLRFCRAFFDPQQVPGFNPFFLLHGNPFTGKTKAVEEVASLFSAPVFTISSYEFADATADHLEAKLDMFVQNVVKSPCAIIFVKDLDVLSISSDEGNIVPGSKSIQILLSKIDLVKSPQGRYIVIGTCHSIEKIPYEILSESFFELKFSELEMDERLELLKIYANNVIIDKRISLKDVALKTNSMSFGELECLPDHMTKAAVDRIKRTGYDNDSIILSGPIITEQDVDVSINRIRKEKSNTIFTVPKVNWDDIGGLEEAKTVLRDTLQLPLQFPELFSQGLKPRSGVLLYGPPGTGKTLLAKAVATELSLEFVSIKGPELLNMYVGESEANVRNVFEKARNSSPCVIFFDELDSIAPHRGNSSDSGNVMDRVVSQLLAELDSISKDNNKYVFVIGATNRPDLLDPSLLRPGRFDKLVYLGINKSEESKASMLRALTKTFKLDETIDLNEIAKNCHPNFTGADMYALCSDAVLSAIKRKTNEIDLLIQASGTDLSTEEFFKRNENQDSLELRITKEDFLTSLKKLRPSISEQELHRYEMVRHQFS

SEQ ID NO: 23244 - protein, 835 aa, Saccharomyces cerevisiae
MGEEHKPLLDASGVDPREEDKTATAILRRKKKDNMLLVDDAINDDNSVIAINSNTMDKLELFRGDTVLVKGKKRKDTVLIVLIDDELEDGACRINRVVRNNLRIRLGDLVTIHPCPDIKYATRISVLPIADTIEGITGNLFDVFLKPYFVEAYRPVRKGDHFVVRGGMRQVEFKVVDVEPEEYAVVAQDTIIHWEGEPINREDEENNMNEVGYDDIGGCRKQMAQIREMVELPLRHPQLFKAIGIKPPRGVLMYGPPGTGKTLMARAVANETGAFFFLINGPEVMSKMAGESESNLRKAFEEAEKNAPAIIFIDEIDSIAPKRDKTNGEVERRVVSQLLTLMDGMKARSNVVVIAATNRPNSIDPALRRFGRFDREVDIGIPDATGRLEVLRIHTKNMKLADDVDLEALAAETHGYVGADIASLCSEAAMQQIREKMDLIDLDEDEIDAEVLDSLGVTMDNFRFALGNSNPSALRETVVESVNVTWDDVGGLDEIKEELKETVEYPVLHPDQYTKFGLSPSKGVLFYGPPGTGKTLLAKAVATEVSANFISVKGPELLSMWYGESESNIRDIFDKARAAAPTVVFLDELDSIAKARGGSLGDAGGASDRVVNQLLTEMDGMNAKKNVFVIGATNRPDQIDPAILRPGRLDQLIYVPLPDENARLSILNAQLRKTPLEPGLELTAIAKATQGFSGADLLYIVQRAAKYAIKDSIEAHRQHEAEKEVKVEGEDVEMTDEGAKAEQEPEVDPVPYITKEHFAEAMKTAKRSVSDAELRRYEAYSQQMKASRGQFSNFNFNDAPLGTTATDNANSNNSAPSGAGAAFGSNAEEDDDLYS

SEQ ID NO: 23245 - protein, 780 aa, Saccharomyces cerevisiae
MAPKSSSSGSKKKSSASSNSADAKASKFKLPAEFITRPHPSKDHGKETCTAYIHPNVLSSLEINPGSFCTVGKIGENGILVIARAGDEEVHPVNVITLSTTIRSVGNLILGDRLELKKAQVQPPYATKVTVGSLQGYNILECMEEKVIQKLLDDSGVIMPGMIFQNLKTKAGDESIDVVITDASDDSLPDVSQLDLNMDDMYGGLDNLFYLSPPFIFRKGSTHITFSKETQANRKYNLPEPLSYAAVGGLDKEIESLKSAIEIPLHQPTLFSSFGVSPPRGILLHGPPGTGKTMLLRVVANTSNAHVLTINGPSIVSKYLGETEAALRDIFNEARKYQPSIIFIDEIDSIAPNRANDDSGEVESRVVATLLTLMDGMGAAGKVVVIAATNRPNSVDPALRRPGRFDQEVEIGIPDVDARFDILTKQFSRMSSDRHVLDSEAIKYIASKTHGYVGADLTALCRESVMKTIQRGLGTDANIDKFSLKVTLKDVESAMVDIRPSAMREIFLEMPKVYWSDIGGQEELKTKMKEMIQLPLEASETFARLGISAPKGVLLYGPPGCSKTLTAKALATESGINFLAVKGPEIFNKYVGESERAIREIFRKARSAAPSIIFFDEIDALSPDRDGSSTSAANHVLTSLLNEIDGVEELKGVVIVAATNRPDEIDAALLRPGRLDRHIYVGPPDVNARLEILKKCTKKFNTEESGVDLHELADRTEGYSGAEVVLLCQEAGLAAIMEDLDVAKVELRHFEKAFKGIARGITPEMLSYYEEFALRSGSSS

SEQ ID NO: 23246 - protein, 837 aa, Saccharomyces cerevisiae
MVKVKSKKNSLTSSLDNKIVDLIYRLLEEKTLDRKRSLRQESQGEEGENNEGEEDEDIFESMFFAKDLTAGEIFTFCLTKDLSLQRVKKVVLQKTIDRMLKDVIESELEEFGSYPGYNNEEEEKPSLEEELAKKNMMIERDTNEMNKRITSTWSKSGSVSESITETDDPKTEEVKKSKKRSKEGTCKVKRQKIKEDRSPPNSSLKSLGGMDDVVAQLMELIGLPILHPEIFLSTGVEPPRGVLLHGPPGCGKTSIANALAGELQVPFISISAPSVVSGMSGESEKKIRDLFDEARSLAPCLVFFDEIDAITPKRDGGAQREMERRIVAQLLTSMDELTMEKTNGKPVIIIGATNRPDSLDAALRRAGRFDREICLNVPNEVSRLHILKKMSDNLKIDGAIDFAKLAKLTPGFVGADLKALVTAAGTCAIKRIFQTYANIKSTPTTATDSSEDNMEIDETANGDESSLKNTANMIDPLPLSVVQQFIRNYPEPLSGEQLSLLSIKYEDFLKALPTIQPTAKREGFATVPDVTWANVGALQRVRLELNMAIVQPIKRPELYEKVGISAPGGVLLWGPPGCGKTLLAKAVANESRANFISIKGPELLNKYVGESERSIRQVFTRARASVPCVIFFDELDALVPRRDTSLSESSSRVVNTLLTELDGLNDRRGIFVIGATNRPDMIDPAMLRPGRLDKSLFIELPNTEEKLDIIKTLTKSHGTPLSSDVDFEEIIRNEKCNNFSGADLAALVRESSVLALKRKFFQSEEIQSVLDNDLDKEFEDLSVGVSGEEIIVTMSDFRSALRKIKPSVSDKDRLKYDRLNKKMGLTEEMKDAEEMKQ

SEQ ID NO: 23247 - protein, 745 aa, Thermoplasma volcanium
MDNSSGIILRVAEANSTDPGMSRVRLDESSRRLLDAEIGDVVEIEKARKTVGRVYRARPEDENKGIVRIDSVMRNNCGASIGDKVRVRKVRTEIAKKVTLAPIIRKDQRLKFGEGIEEYVQRALIRRPMLEQDNISVPGLTLAGQTGLLFKVVKTMPGKVPVEIGEETKIEIREEPASEVLEEVSRVSYEDIGGLSEQLGKIREMIELPLKHPELFERLGITPPKGVILYGPPGTGKTLIARAVANESGANFLSINGPEIMSKYYGQSEQKLREIFSKAEETAPSIIFIDEIDSIAPKREEVQGEVERRVVAQLLTLMDGMKERGHVIVIGATNRIDAVDPALRRPGRFDREIEIGVPDRNGRKEILMIHTRNMPLGMDEEQKNKFLEEMADYTYGFVGADLAALVRESAMNALRRYLPEIDLDKPIPTEILEKMVVTEEDFKNALKNIEPSSLREVMVEVPNVHWDDIGGLEDVKREVKETVELPLLKPDVFKRLGIRPSKGFLLYGPPGVGKTLLAKAVATESNANFISIKGPEVLSKWVGESEKAIREIFKKAKQVAPAIVFLDEIDSIAPRRGTTSDSGVTERIVNQLLTSLDGIEVMNGVVAIGATNRPDIMDPALLRAGRFDKLIYIPPPDKDARLSILKVHTKNMPLAPDVDLDSIAQRTEGYVGADLENLCREAGMNAYRENPDATQVSQKNFIDALKTIRPSIDEEVIKFYKSISETMGKSVSEKRKELQDQGLYL

SEQ ID NO: 23248 - protein, 375 aa, Thermoplasma volcanium
MSDDVQNKIEKATKLLHAGIKEEENGHKDKAKEYYLVAYRVMLEAANDSPSDLKKKRLDQCALILNAYKRVSGERTDFTVKKQNDDEIVEGEALLEEIGIEKPEIPKVTFEDVAGLDDVKNEILGKIIYPMKFKELSQEYNIQFGGGMLLYGPPGTGKTFIVKAIANEVKARFINVNPSTLYSEWFGVFEKNISKLFRAASLLSPAIIFFDEIDALVPKRDTSNSDAAKRGVAQLLNEVGGINSQKNKNIFIIAATNNPWEVDEAMLRPGRFDIKIYVPPPDIVARKKIFQLNLAKIKQVGNVDYDLLAEETEGYSGADIEFICKKAAQNVFMEAVKTGKSRPVETRDVIDVIGSIKPSIDYELLEKYSKYGSAF

SEQ ID NO: 23249 - protein, 824 aa, Neurospora crassa
MAPEPNPDHVEQKKKVNLMDASGAEHKAEDDTATAILKKKKKPNQLMVTDAVNDDNSIIALSNNTMEQLQLFRGDTVLVRGKKRKDTVLIVLADDDLDDGSARLNRVVRHNLRVKHGDIITIHPCPDIKYAKRIAVLPIADTVEGITGSLFDVFLAPYFREAYRPVRQGDLFIVRGGMRQVEFKVVEVDPPEYGIVAQDTVIHCEGEPIQRDEEENNLNEVGYDDIGGCRKQMAQIREMVELPLRHPQLFKSIGIKPPRGVLLYGPPGTGKTLMARAVANETGAFFFLINGPEIMSKMAGESESNLRKAFEEAEKNSPAIIFIDEIDSIAPKREKTNGEVERRVVSQLLTLMDGMKARSNVVVMAATNRPNSIDPALRRFGRFDREVDIGIPDPTGRLEILQIHTKNMKLADDVDLEQIAAETHGYVGSDIAALCSEAAMQQIREKMDLIDLDEDTIDAEVLDSLGVTQENFRFALGVSNPSALREVAVVEVPNVRWEDIGGLETVKQELRESVQYPVDHPEKFLKFGLSPSRGVLFYGPPGTGKTMLAKAVANECAANFISVKGPELLSMWFGESESNIRDIFDKARAAAPCVVFLDELDSIAKARGGSVGDAGGASDRVVNQLLTEMDGMTSKKNVFVIGATNRPEQLDPALCRPGRLDSLIYVPLPDEAGRLGILKAQLRKTPVAADVDLNYIASKTHGFSGADLGFITQRAVKIAIKESITADIQRTKEREAAGEDVEMEDEVEDPVPELTKRHFEEAMSMARRSVSDVEIRRYEAFSQQMKNAGPGAFFKFPEGGVESSGNGGAGNSFGDAGNDDDLYN

SEQ ID NO: 23250 - protein, 884 aa, Neurospora crassa
MPGRANLRHGIDRDVYQLVVKLEIEEEDRREAIIEKEGKNSKNLSSRRGLSVSSVYDSIKRSNSSLARQKKKLLEDSIERVLDLRREEAKKDAVEDSDDAIEAADEAEAAKRNKSAEATATGFLNKQIAKAWGLAAPKLPATTAVSGEGVAVVENGGGEAGAAGEGGSGSVPQTPGLGAAAVAPGSSERQANGEPRGKKRKAEKISKEKEVDRSPPTGISIKDIAGVDDTLDKLLHEVWFPLCAGEACAKMGYRYDNGVLLHGPSGCGKTTLAHAVAGSVGAAFIPVSAPSIVGGTSGESEKNIRDVFDEAIRLAPCLIFIDEIDAIAGKRESANKGMEGRIVAEIMNGMDRIKQQTPLGKNVVVLAATNRPDFLDPAIRRRFSAEIDMGMPNERAREHILKSLSRDLNVADDVNFAELAKLTPGYVGSDLQYVVKAAVSESFRGSLDALLEKARQLRAAAAEAATAAITSDSPEGHEEQQKQIQKELDDTLTGISQKQRDWLLLEDHRQASWSDSCITMAQFRLAVSRVQPASKREGFSTIPDTTWAHVGALDEVRKKLEMSIIGPIKRPELFTKVGIKPAAGILLWGPPGCGKTLVAKAVANESKANFISIKGPELLNKYVGESERAVRQLFARAKSSAPCILFFDEMDALVPKRDDSLSDASARVVNTLLTELDGVGDRSGIYVIGATNRPDIIDEAIRRPGRLGTSIYVGLPSAEDRVDILRTLYRNSIARAKASQTAAAAPPRPTPTTTPAVEGDVMDIDGGSGAVLPGQQTPSATAAAMDETMQEAEKQLERVALDLRCTGFSGADLGNLMQAAAQACLERAYLSQMYQSSKESGTPTEEEKVTDMVANPVITPEDWEKALNEVKPSVKDPEKYVHID

SEQ ID NO: 23251 - protein, 802 aa, Neurospora crassa
MGTKSLEFKVRKLQANSTTEKDLAKKQPSRVYVNEEALLELTGSKDGGRAITIEKIDRNSSDDQPVRREATLWKSPERIDKASVQLYDAFRDACGYQAGVQVKVTVQEGKLPEAEEVVLEQLPPEKAGKDAETAASIDPSDLPGWEFFLAGRLSMIEHVHAGLTFKNLYARGPQRSFVVASVNGRPTGNARYLDGKTKVRIGAPSPAGQVDGVPQGKLEVTGVRGLDAQIEKLNDLLSQFTDPWVFQGKPRYRGIVIHGGHGTGKSMLLNTIAATGWGTVYRIQPKDKLADIQDMFQKARLEQPSIILIDQLERLIDKERNNRTSVIQALCEALDTLGADAQETGEIPKVAVVVTCLDYTTDVPEDLKDPGRLTGEVYLPLPDVDGRKEILASFNLRVTPEEEDALLRSLSERTHAYNGKDLRRIVDEAEFIARTRINRVKKTTTPTSTEDVISLDDQPPATEEVSTLLESMHLSPSNASTATTTTTLTSYFLASDYEEALRLVRPSAMHDVNLKPPPIHWSDIGGQASVKVSLRRAVRMSTEPVHVLSRFFARPPKGFLLYGPPGCSKTMAAQAMATESGLNFFAVKGAELLNMYVGESERAVRRLFQRAREVAPSMIFFDEIDSIAGQRAGFGHGGSSTSGGSSSGLNVLTTLLNEMDGFEALTGVVVLAATNRPQALDPALLRPGRFDELIYVSPPDQEARAAIFKKEAEKRQMLIGDEDIKRLATITDGFSGAEIKGICAVAGTRAYDRYLKLDSVEEDTAVGITMEDLEMAAKGMMRQITPEMIRGFEQWEKQFRRY

SEQ ID NO: 23252 - protein, 798 aa, Pyrococcus horikoshii
MMLMVEKKEIKLKVASAYQRDVGRGIVRIDRRSMRELGVSPGDVVEIIGTKNTAAIVWPAYPEDEGLGIIRMDGTIRKNAGVGLGDEVTIRKADVKEARKVVLAPTEPIRFGRDFVEWLHERLVGRPVVRGDYIKIGVLGQELTFVVTTTQPSGVVQITEYTDFDISEKPVKEVEKRMTTGVTYEDIGGLKDVIEKIREMIELPLKHPELFEKLGIEPPKGVLLYGPPGTGKTLLAKAVANEANAYFIAINGPEIMSKYYGESEERLREVFKEAEENAPSIIFIDEIDAIAPKRSEVTGEVEKRVVAQLLALMDGLKGRGKVIVIGATNRPDALDPALRRPGRFDREIEVGVPDKQGRKEILQIHTRGMPIEPDFRKEDVLKILEGLKKEGKFRDVIDKAIDRVMKVSEDDIPKVLKELNGELYEEVRTRLVDLLLEELAEVTHGFVGADLAALAREAAMAALRRLIKEGKIDFEAETIPREVLDELKVTRKDFYEALKMVEPSALREVLIEVPNVHWDDIGGLEEVKQELREAVEWPLKYPEAFRAYGITPPKGVLLYGPPGTGKTLLAKAVATESEANFIAVRGPEVLSKWVGESEKNIREIFRKARQAAPTVIFIDEIDAIAPRRGTDVNRVTDRLINQLLTEMDGIQENTGVVVIAATNRPDILDPALLRPGRFDRLILVPAPDEEARFEIFKVHTRSMPLADDVDLRELARRTEGYTGADIAAVCREAAMIAMRKALEKGIIKPGMKADEIKQKAKVTMKDFEEALKKIGPSVSKETMEYYRKIQEQFKQARG

SEQ ID NO: 23253 - protein, 840 aa, Pyrococcus horikoshii
MILGRSEPQKEEIKLRVAEALKRDVGRGIVRFDRRYQKMIGVEPGDIVEIEGERVTAAIVANSHPDDKGLDIIRMDGYIRKNAGVSIGDYVTIRRAQVKEAKKVVLAPAQKGVIVQIPGDIIKNNLLGRPVVKGDIVVASGRGDLYYSSGTPFDEIFRGFFEAMSVGFGELKFMVVNTIPKGIVQITYNTEVEVLPQAVEVREEKIPEVTYEDIGGLKEAIQKIREMVELPLKHPELFERLGIEPPKGVLLYGPPGTGKTLLAKAVANEANAYFIAINGPEIMSKYYGESEERLREIFKEAEENAPAIIFIDEIDAIAPKREEVVGEVEKRVVSQLLTLMDGLKGRGKVIVIGATNRPDALDPALRRPGRFDREIEVGVPDKQGRKEILQIHTRGMPIEPDFEKDAVIKVLKDLEKDERFEKEKIEKIIEKVSKANSEDEIKEILKEDGNVYVEVRNRLIDKLLEELAEVTHGFVGADLAALAREAAMVVLRRLINEGKINPEAESIPREVLEELKVTKRDFYEALKMVEPSALREVLIEVPNVHWDDIGGLEEVKQELREAVEWPLKYPKAFKKLGITPPKGVLLYGPPGTGKTLLAKAVATESEANFIAVRGPEVLSKWVGESEKRIREIFRKARQAAPAIIFIDEIDAIAPARGTSEGEKVTDRIINQLLTEMDGLVENSGVVVIAATNRPDILDPALLRPGRFDRLILVPAPDEEARFEIFKVHTRSMPLADDVDLRELARRTEGYTGADIAAVCREAALNALRRVVKSVPKEKLEEESEEFLNKLVVTRKDFEEALKKVKPSVSKYMMEYYRQFEEARKRVSGESVGREPDYFTG

SEQ ID NO: 23254 - protein, 752 aa, Guillardia theta
MNRLIVDEINQNADDNSVVYLNSNKIDNLKLFRGDTILIKTKKKKDTVCIIMSDDNCELEKIRINKTVRENLNIGIGDIVTIHHFTDLKFGKRIHVLPFKDSILGYNGNIFEDFLKPYFLDAYRPIKKGDVFNIKSGNNTFDFRVIEIDPVDYCIVGPDTIIFCEGEPLDRLDTVDYEKITYESIGGCQKQLSQIRELVELPLKHPQLFNTVGIKPPRGVLMYGPSGCGKTLIAKAVANETGAFLYSINGPEIMSKLAGESESNLKKAFDEAEKNSPSIIFIDEIDSIAPKRDKSQGEVERRIVSHLLTLLDGINLNSQVVVIACTNRPNSVDQALRRFGRFDREIDISVPDDKGRLEILQIHTKNMLIDNSVDLEAICKETYGFVGADLAQLCTEAALLCIKESIENFDLEEENIPLVVLNSLRVSQDHFKLALDQSNPSAFRETAVEIPNITWEDIGGLENVKRELQETVQYPVEHPEKFEKFGMQPSKGVLFYGPPGCGKTLLAKAIANECQANFISIKGPELLTMWFGESENNVREVFDKARQASPCVLFFDELDSIARARGSSGSDGGGAGDRVINQILTEIDGVGVRKNVFVIGATNRPDILDPAIMRPGRLDQLVYIPLPDRKSRIQIFRATLRKSPLSKEIDLEVLSRATSGFSGADITEICQRACKLAIRESIFKDIQFAKNSESIVSNNEKYIDPVPEITKEHFLEAMKYARRSVSDSDIRKYEMFAQKLQTSRGFSKEIKF

SEQ ID NO: 23255 - protein, 606 aa, Guillardia theta
MNLLKTCIHIDYYEFVLGISKKVIRYNKKTIDHKYNNFSKENNCFSRIENPKQDFLNFNFNYSKNFFLSEPRLPSFRFVDFIGIENYFKKISDILEFYINHTNNYKNPSVPHKNVIILSGPSGTGKTLFTNALAGEIGINLIDVKIEEFSSLKSKKILYEFKKYIKFRKCLLLIDNIDHFFDEDNFNSPNKKYQNLLSSLMFLKENFLDNHLLFIILENSKNIKTMLKKFDFSFNEIEFKIPSVDIRFQMIRNYSKKFFLNGDDDIFFLTRRTNGLVCKDIINVFIKASEHSYYRKTKRVLGGFYRKPRKDIIPILKELRPMDIDYAFDFFNYNFDKITTHNFSDVTWSEIGGLENTKKVISKFIIEPILYNNHIGSNFGQGNGILINGPPGCGKTMIAKAAAKESGANFSYIKGPEILDKFLGESEKAIRKIFLNAKENSPTIIFFDEFDSLALKRDSFHGDSNSGERIVNQLLSEIDNFNRKSKIFLIAATNRLDIIDKAFLRPGRFDHVLNVNYPSYREKISIFKTTIRKVEVLPGINSKLISYFFLRINFTGADISWIIKKATVQSKDDRIFYCQPFTSNKGLFINRNSKISLKNLVTDYVK

SEQ ID NO: 23256 - protein, 699 aa, Aeropyrum pernix
MKELGVEPGDVVEIEGKKKTVAIVMPAYPEDMGLDIIRMDGILRRNADVNIGEKVIVRKTSVRTATKVKLAPVSYTMTVDEGFKRYVKKKLQGVPITEGDVVVVPVIGQAVQLQVVDARPKGAVIVSEETIVDVLEKPVAQSRVPKVTYEDIGGLKEVIEKVREMVELPLRHPEIFKRLGIEPPKGILLYGPPGTGKTLLAKAVANEADAYFISINGPEIMSKYYGESEQRLREIFEEAKKNAPSIIFIDEIDAIAPKRDEVVGEVERRVVAQLLALMDGLEARGNVIVIAATNRPNAIDPALRRPGRFDREIEVPLPDKHGRLEILQIHTRHMPLAEDMDLEKLAEMTKGFTGADLAALAREAAMYALRRYLPEIDLDQESIPVEVLEKMVVTMEDFLKALREITPSGLREIQIEVPEVRWSDIGGLEDVKQELREVVEWPLKHPEAFTRMGIRPPRGVLLFGPPGTGKTLLAKAVATESGANFIAVRGPEILSKWVGESERAIREIFAKARQHAPAVVFFDEIDAIAPVRGTDVGTRVTERIVSQLLTEIDGVSDLHDVVVIAATNRPDMVDPALMRPGRLEKMIYVPPPDFSSRLEILRIHTRKVPLAEDVDLAEIARRTEGYTGADIEALVREASLAALREDINAAEVSMRHFEVALKKVKPSVTPQMVEYYKRWLETVKQRQEEVKREAPTITL

SEQ ID NO: 23257 - protein, 726 aa, Aeropyrum pernix
MANSSVELRVSEAYPRDVGRKIVRIDRQTAARLGVEVGDFVKVSKGDRSVVAVVWPLRPDDEGRGIIRMDGYLRAALGVTVGDTVTVEKAEKVEPASKVVLAPTEPIRFGRDFVEYVKEFLLRKPISRGETIIVPVLEGLPLVVVSTQPAHFVYVTEATEVEIREKPVREEIERLRGVPKVTWEDIGDLEEAKERIREIVELPMKHPEIFKHLGIEPPKGILLYGPPGTGKTLLAKALANEIGAYFISINGPEIMSKYYGESEQRLREIFKEAEENAPSIIFIDEIDAIAPKREEVTGEVEKRVVAQLLTLMDGLKERGRVIVIGATNRPDAIDPALRRPGRFDREIEIRPPDKRARAEILKVHTRNMPLAEDVDLDKLAEMTHGYTGADLAALAKEAAMAALRRFIREGKINFEAKEIPATVLKELKVTMKDFMEAMKMIRPTLIREIYVEVPEVRWSDIGGLEEAKQALREAVEWPLKHPEIFEKMGIRPPRGVLLFGPPGTGKTLLAKAVATESGANFIAVRGPEILSKWVGESERAIRKIFERARQAAPAVVFFDEIDAIAPARGARFDTSGVTDRIVNQMLAEMDGIQPLSNVVVIGATNRPDILDPALLRPGRFDRLIYVPPPDKEARKEIFKIHTKKVPLGEDVDLEKLAEMTEGYTGADIEAVVREAVMAKLREKLEVGKVEMRHFLEALKKVPPSLTKEDILRYERLAKELKKLTLG

SEQ ID NO: 23258 - protein, 780 aa, Trypanosoma brucei
MSAKAQQVKQQKLNRLIADDLAEDDNSVVVLNAKRMDELSIFRGDTVKLKGKKNRSTICIAMSDENCPEGSIMVNKVTRRNIRILLGDLITVSSHSNVPYGNHVHVLPIDDTVKNLTGDLFETFLKPYFLEAYRPVKTGDLFICRGAMRSVEFKVVEVDPGDCCIVAPETVVHCEGDPIRREDEERLDDVGYDDIGGCRRQLVQIREMVELPIRHPELFKSIGIKPPRGILMYGPPGSGKTLIARAVANETGAFFFLINGPEIMSKMAGESEGNLRNAFVESEKNAPAIIFIDEIDSIAPKREKAQGEVEKRIVSQLLTLMDGLKGRSQVIVMAATNRPNAIDPALRRFGRFDREIDIGVPDEIGRLEILRIHTKNMKLDPNVDVEKIAKDSHGYVGADLAQLCTEAAMQCVREKMAVVDWDDETIDAEVLDSMSVTNNHFLDALSKMNPSALRETQVETPNVTWSDVGGLLDVKRELQELVQYPVEFPWKFEKYGISAPKGVLFYGPPGCGKTLLAKAIATECQANFISIKGPELLTMWFGESEANVRDVFDKARAAAPCVLFFDELDSVARSRGHSGDGGASDRVINQILTEMDGMNSKKNVFIIGATNRPDVLDPAVMRPGRLDQLIYIPLPDKASRVAILKASFRKSPLAPDVDLDQLAAATHGFSGADLAGICQRACKLAIRESIAKEIQLEEARANGVLNEDQDIDPVPQITRLHVEEAMRGARRSVSDADIRKYELFATSLQQSRAFGNVSLDPGNQGGAGGDAGAGDDDLYS

SEQ ID NO: 23259 - protein, 1229 aa, Plasmodium falciparum
MKVRKMHYPLFSFTEYLSCYIILYFFVFLPNYSYAININNYHNKNNLWNINNKWNNQQSNHFSNNRIGHFLWGSKIRKNPLASISTSITTKKLENQKKKTNKNESYSNVNDKYEHNNNTAHFVQINYKNDQSNDTLSTYKNNNEMTVEGKPNNLASGEGKKEIHNTTQKILEKVDYFKEREKITNSYNNNNNNNKVIVTHDNKNHTNYINKVENKQSDDKIKNLNNKYIKKFKSHILQNDILGTISTMFWSGKKNNNGNVKKGIKNVPMDEKSYSPNDHDNNSNNSNNNNNNDNNNSNNNNNNNNGGKNNSYYNEKTQKGVNDKETNFLLKALDSGKFPTYCLVENIDENLDNFDIYMSKEKMDELNINDGATVLLKGKKKREMLGIARLDRSLKKHYVVISFAMKKNLRLMHNDIIKIHPFMNAKRIRNVVLSPFSDTIPNLSREELEKAVIHPYLKNSYKPLRVNSNIYIYYKNNKIEFKVLKIISEESENEEFGCIGEHSQLTLAEEYLKREDYEENNDDITYEDLGGMKKQLNKIRELIELPLKYPEIFMSIGISAPKGVLMHGIPGTGKTSIAKAIANESNAYCYIINGPEIMSKHIGESEQKLRKIFKKASEKTPCIIFIDEIDSIANKRSKSNNELEKRVVSQLLTLMDGLKKNNNVLVLAATNRPNSIDPALRRFGRFDREIEIPVPDEQGRYEILLTKTKKMKLDPDVNLRKIAKECHGYVGADLAQLCFEAAIQCIKEHIHFLDLDEEDFIEFMKISVDEDKKNMGNEPYGSSHTNNSNYINHLTESSNKLSYTNMFPLNRKNTLLQNDKNEMNKDSSYDKKTDALDNYKNDSTIDMEKKKNKKKSNFFFSNDDEETKNKNKTNVNQKKKKNPNDKLDKNERRIPAYILNKLTIKAKHFQHALNICNPSSLRERQVQIPTVTWNDIGGMNEVKEQLKETILYPLEYKHLYNKFNSNYNKGILLYGPPGCGKTLLAKAIANECKANFISVKGPELLTMWFGESEANVRDLFDKARAASPCIIFFDEIDSLAKERNSNTNNDASDRVINQILTEIDGINEKKTIFIIAATNRPDILDKALTRPGRLDKLIYISLPDLKSRYSIFKAILKNTPLNEDVDIHDMAKRTEGFSGADITNLCQSAVNEAIKETIHLLNIRKKEQEEQRKKNKNSFKIDDTDTYDPVPTLSKKHFDLAFKNARISIQPEDVLKYEKFKEKLSLQDF

SEQ ID NO: 23260 - protein, 709 aa, Plasmodium falciparum
KKKREMLGIARLDRSLKKHYVVISFAMKKNLRLMHNDIIKIHPFMNAKRIRNVVLSPFSDTIPNLSREELEKAVIHPYLKNSYKPLRVNSNIYIYYKNNKIEFKVLKIISEESENEEFGCIGEHSQLTLAEEYLKREDYEENNDDITYEDLGGMKKQLNKIRELIELPLKYPEIFMSIGISAPKGVLMHGIPGTGKTSIAKAIANESNAYCYIINGPEIMSKHIGESEQKLRKIFKKASEKTPCIIFIDEIDSIANKRSKSNNELEKRVVSQLLTLMDGLKKNNNVLVLAATNRPNSIDPALRRFGRFDREIEIPVPDEQGRYEILLTKTKKMKLDPDVNLRKIAKECHGYVGADLAQLCFEAAIQCIKEHIHFLDLDEEDFIEFMKISVDEDKKNMGNEPYGSSHTNNSNYINHLTESSNKLSYTNMFPLNRKNTLLQNDKNEMNKDSSYDKKTNALDNYKNDSTIDMEKKKNKKKSNFFFSNDDEETKNKNKTNVNQKKKKNPNDKLDKNERRIPAYILNKLTIKAKHFQHALNICNPSSLRERQVQIPTVTWNDIGGMNEVKEQLKETILYPLEYKHLYNKFNSNYNKGILLYGPPGCGKTLLAKAIANECKANFISVKGPELLTMWFGESEANVRDLFDKARAASPCIIFFDEIDSLAKERNSNTNNDASDRVINQILTEIDGINEKKTIFIIAATNRPDILDKA

SEQ ID NO: 23261 - protein, 1224 aa, Plasmodium falciparum
MFVDSLKKRIYHIIVKKNFIRKDENKENNLKNVLSNCSVIESLLRKEFQEYRRSPKNKLYGLIMNIIKKSLFVNYDKFMIKYINKKKKKKMKLNNNCQVNNNNNNNNNNFIYDTNHIISNDITTCDIIEGDNCRSTILNDNNEIINYTNKNEYNQNNIEDEKMNEQNIHGHDPNDVLLNEKDLNVGNEFIKNNMLKNKKKLKIIEGKLKDEKNVQSHLTNNQINENMNHMKQEHNKSSFNNSNKIINSIISNKTLNDFKGIKNIKKDILYSIIYPYKFRLSNLNCIINIFGTSGTGKTTLSYAIAGECGCPFFYIKLPEYIKYISNDNKNNKLRILFEHIKNEYDKAILCIDDIDIIFSSKDDSTDLYLFTYLLNIFHNSNIIVLLLSINKPNDSILYSKIQKFITIPIPTYDDRIEILEQASCEYFLSFDIPYTASITYGFNRGQIFDIMNESLNLYIYNELLRKDLKINHMIKNEVDHVTQTCENINKINCNENIMVHQKSHHISNKINNDNNDNNDNNNDNNNNNNNNNNNNNNASVWGYTKSDNDFFKNVTNYEEIKQNDQLTSHEQNILITSIKTNDENQIASTEIPQELSNDSPCLNNQNNHNLKEINHKRKYNMLLCSLNEEKVIEGKAEKKIQKTIEINNDIIFEGVNNIKKKMTNENICEVPNINLDNIGSLKKIKKILESKFILPVKYSNIYKHLGINKSMGILLYGPPGCGKTMLAKAISNEMKANFIAIKGPEILNKYVGESEKKVREIFSYASVYKPCLIFFDEIDSICINRSNNKSVSASDRVVNQLLSEMDGLSQREGVYIIATTNRPDIIDKALLRSGRFDQLIYISLPKYQGRVDILKKLSKNMPIDKNVRFEEISKLTRGYSGADLYGVLRESAFIALQECRDKIDIQNKSNPKNNNIYNNTDQQMNKDTNVINIMNQHLSIQENNSIKQHSTIFSTSNINNNNVDHIYSIHNFDHIKSNSYRTNKTVSQDMNNSIDDNTKPYILDDSVDNNRVLSKGQNNINQMDQINLDEIVKISENFTNEYKSNNVNTYKLSNNNIMDIQRLDININHNNSNNLNYNKMNDEISSSNNKNKDISFNDHQNMFSTNNFGKNKNMIKLEYNNNMEEEQRDYNNSSQNCILSTNNNHLNEKDRNNLIYEYIQKNKNILTITQKHIIQAIKIIPRSVTKEQIKYYKEIFLLYYSYIFLIFYIFKNYYLIYKIFFFFM

SEQ ID NO: 23262 - protein, 751 aa, Paramecium tetraurelia
MIPAKAFQLLPVALNKTEEAFTGFLYTSKNTHAQLKQRYNVQGDLFIQINGYVFQLQGENGYKDDSIAGSKYVRQLLRMSFTDKIDVAVFSLPKDKEYRLGVLDVELDIVQQSGTLDRLELNSEDLAPFLKRAYSGQFFRAGQIQLFLFEGNTYLFKVTRTDVLSVGVESQQVKFMGGGMLVDETEVEFSIRQGVNQLKMKNASTHTASIFREDFSFDKLGVGGLDKELANIFRRAFSSRRFPQAFLEKYGIKHIKGLLLYGPPGTGKTLIARQLAKVLKAKPPKIVNGPEIFSKFVGEAEENVRKLFAEAIADQETKGDQSDLHIIVFDEMDAICKQRGSINSGSGAYDNVVNQLLSMIDGVNSLNNILVIGMTNRKDLIDEAVLRPGRFEVHIEVGLPDEQGRQQILNIHTDNLKKNNALDKDVNLEELAQITKNYTGAEIEAVVKSASSFAFQRMQSIFDFQKKLTKQDELQVRRCDFMNALDEVKPQFGIDTNKFDLLLKNRLIDFGEEFRKLQKILKNTIDQTRFGKNSQLNSVLLEGEQGSGKTSVAAWLAVECGFPYVKLISPETFIGLTEGAIINQMVRIFNDAYKSSLSCILIDNIERLIEYVDIGPRFSNAILQALLVLIKRLPDKSQCRLLIIGTTSQYQIMKQLEVVSCFNVAFKVPNLIKPDEINLVIKDYLTTSPQSSNKIQLSQQQEQSVNTIATQIKDIPIKRLLMLLDMVGAQEKGLNVEEFMICYTTVMMNHL

SEQ ID NO: 23263 - protein, 751 aa, Paramecium tetraurelia
MISAKAFQLLPVALNKTEEAFSGFLYTSKNTFTQLKQKYNVQGDLFIQINGYVFQLQGENGYKDDSIAGSKYVRQLLRMSFTDKIEAAVFALPKDKEYRLGVLDIELDIVQQQGSLDRIEMNSEDLAPFLKRAYSGQFFRAGQIQLFLYEGNTYLFKVTRTDVLSVGVDSQQVKFMGGGMLVDETELEFSIRQGVNQLKMKNASTHTASIFREDFSFDKLGVGGLDKELANIFRRAFSSRRFPQAFLEKYGIKHIKGLLLYGPPGTGKTLIARQLAKVLKAKPPKIVNGPEIFSKFVGEAEENVRKLFAEAIADQETKGDQSDLHIIVFDEMDAICKQRGSINSGSGAYDNVVNQLLSMIDGVNSLNNILVIGMTNRKDLIDEAVLRPGRFEVHIEVGLPDEGGRQQILNIHTENLRKNEALDYDVNLEELAQITKNYTGAEIEAVVKSASSFAFQRMQNIFDFQKKLNKQDELKVKRSDFMNALDEVKPQFGIDSNKFDLLLKSRLIDFGDEFKKLQKILKNTIDQTRFGKNSQLNSVLLEGDQGSGKTSVAAWLAVECGFPYVKLISPETFIGLTEGAIINQMVRIFNDAYKSSLSCILIDNIERLIEYVDIGPRFSNAILQALLVLIKRLPDKSQCRLLIIGTTSQYHIMKQLEVVSCFNVSFKVPNLIKPDEIKLVITDYLTTSPQSQNKLQLTQQQEQQVNIIASQIKNIPIKRLLTLLDMVGAQEKGLNIDEFMICYTTVIMNHL

SEQ ID NO: 23264 - protein, 780 aa, Encephalitozoon cuniculi
MAAAANEKDFSTAILESKTKNTLIVCDKDCSKLRTYQVGLHPTTLNELELFESDYVRILGKKKAELIFSTVALESVPPRHIAIVRDGRFNLRIRITDTVKLYRVDKDIPVVSKLNFLPIKDTVENIRGNIFDEFVRPFLDFNFMPLTTGSIYGVTSGLGRVEFKVTKMIDAQDMEIKHGSVTSTTSVYCDETISREEVEKEFNMVGYDDVGGCRAQMAKIRELVELPLRHSQLYSKIGVKPPKGILLYGPPGTGKTLIARAIANETGAFLFLINGPEIMSKMAGESESNLRKAFEEAEKNSPAIIFIDEIDALAPKREKSQGEVERRIVSQLLTLMDGMKARSNVIVLGATNRPNSIDPALRRYGRFDREIEIGVPDETGRLEILRIHTKNMKMSEDVDLVAINKELHGFTGSDLASLCSEAALQQIREKLPQIDLDSEKIDAKVLASLKVNSENFRYAIEHTDPSSLRETVIQSPNVKWSDIGGLEQVKQELRETVQYPVEYPEKFIKFGMTPAKGVLFYGPPGCGKTLLAKAVATECKANFISIKGPELLSMWVGESESNIRDLFARARGAAPCVLFFDEIDSIAKARSGNDGSSGATDRMLNQLLSEMDGINQKKNVFVIGATNRPDQLDSALMRPGRLDQLVYIPLPDLDSRVSILQATLKKTPLSPEIDLRQLAEATDKFSGADLSEICQRACKLAIRETIEYELEQKKKGSEMMDLEDPVPYLRPDHLVQSLKTARRSVSEKEVERYEAFARSMKVDVRKFDKKNDINDDGLYE

SEQ ID NO: 23265 - protein, 506 aa, Encephalitozoon cuniculi
MNRKNLVRDAGSALRDKYITSHLNESLKIDREYPPLHSVGGIKYLLPKITELVYNPLFAKASYDEIGIHPPSTLLLHGVSGVGKTFLVNCISQEYKLPIVKACMDSDKELRESFRKSSLLERSIILIEDIDALGEDDRKVISQLSEYLENHKGKSIVISTARNPALIHESLNKFDNSLLVKIPTTDERRDILARLAEKMKCQGVDWTDLAKLMPGFVARDLKRTLKIASTKAVMDGSPVVRMADFEAALREIRWKGTDITFDSIGSLEDVKDELNMSIVFPSRFPEKFHKLGITRPSGILLYGPPGCGKTLLVRAVSNMSHCNFLSIKGPELISKYVGDSEKEIRKLFDKAKQLQPCVLFFDEIDSLCGERSGNEFTGRIVNQILTLLDGLEDRGDVYVIGATNRIESIDKAILRPGRFDKILRVPLPSRKGCIDIFRKCAEGVPIEPFDFEELELEGFSGAEIAGLIRDAATLCLKQNFDADSLVITKENIIEALQTARVTKDFR

SEQ ID NO: 23266 - protein, 308 aa, Schistosoma japonicum
MVELPLRHPQLFKAIGVKPPRGILLYGPPGTGKTLVARAVANESGSFFFLINGPEIMSKLAGESESNLRKAFEEAEKNAPAIIFIDELDAIAPKREKTHGEVERRIVSQLLTLMDGLKQRSHVIVMAATNRPNSVDPALRRFGRFDREIEIGIPDSIGRLEILRIHTKNVRLAKDVDLVQIANEAHGHVGADLASLCSEAALQQIRNKMDLIDLEDDTIDAEVLNSLAVTMDDFRWALGKSNPSALRETTVEVPNVTWDDIGGLENVKRELQELVQYPVEHPDKFLKFGMTPSKGVCFTVLQVAVRRC

SEQ ID NO: 23267 - protein, 810 aa, Caenorhabditis elegans
MASVPTQRDEKEKKNDELATAILKDKKRPNRLIIDQSDNDDNSMVMLSQAKMDELGLFRGDSVILKGKKRRETVSIVLNADNCPNDKIKMNKVVRNNLRSRLGDVVSISSAQLEYGKRVHVLPIDDTIEGLTGNLFDVFLRPYFTDAYRPVHKGDIFTVQAAMRTVEFKVVETDPAPACIVAPDTVIHYEGDPIKREEEEEALNEVGYDDLGGVRKQLAQIKEMVELPLRHPQLFKAIGVKPPRGILLFGPPGTGKTLIARAVANETGAFFFLINGPEIMSKMSGESESNLRKAFAECEKNSPAILFIDEIDAIAPKREKAHGEVEKRIVSQLLTLMDGLKTRAHVVVIAATNRPNSIDGALRRFGRFDREIDIGIPDAVGRLEILRIHTKNMKLGEDVDLEQVANECHGFVGADLASLCSEAAIQQIREKMELIDLEDDTIDAEVLNSLAVTMENFRFAMGKSSPSALREAVVETPNTTWSDIGGLQNVKRELQELVQYPVEHPEKYLKFGMQPSRGVLFYGPPGCGKTLLAKAIANECQANFISIKGPELLTMWFGESEANVRDVFDKARAAAPCVLFFDELDSIAKARGGSVGDAGGAADRVINQVLTEMDGMNAKKNVFIIGATNRPDIIDPAVLRPGRLDQLIYIPLPDEASRLQIFKASLRKTPLSADLDLNFLAKNTVGFSGADLTEICQRACKLAIRESIEREIRQEKERQDRSARGEELMEDELADPVPEITRAHFEEAMKFARRSVTDNDIRKYEMFAQTLQQSRGFGNNFKFPGEAPSAGQPVGGNGGSGGNDDDDLYN

SEQ ID NO: 23268 - protein, 809 aa, Caenorhabditis elegans
MASVPTHQSEKEKKNDELSTAILKDKVKPNRLIVDQSEQDDNSVIAVSQAKMDELGLFRGDAVILKGKKRKESVAIIVSDESCPNEKVRMNRVVRNNLRIRLGDVVSITPAPNLSYGTRIHVLPIDDTIEGLTGNLFDVFLKPYFLEAYRPLHKGDIFTVQAAMRTVEFKVVETEPAPACIVSPDTMIHYEGDPIKREEEEESMNDIGYDDLGGVRKQLAQIKEMVELPLRHPQLFKAIGIKPPRGILLFGPPGTGKTLIARAVANETGSFFFLINGPEVMSKMSGESESNLRKAFEECEKNQPAILFIDEIDAIAPKREKTNGEVERRIVSQLLTLMDGVKGRSNLVVIAATNRPNSIDGALRRFGRFDREIDIGIPDAVGRLEILRIHTKNMKLADDVDLEQIANECHGFVGADLASLCSEAALQQIREKMELIDLEDDQIDAEVLNSLAVTMENFRFAQGKSSPSALREAVVETPNTTWSDIGGLQNVKRELQELVQYPVEHPEKYLKFGMQPSRGVLFYGPPGCGKTLLAKAIANECQANFISIKGPELLTMWFGESEANVRDVFDKARAAAPCVLFFDELDSIAKARGGGAGGDGGGASDRVINQVLTEMDGMNAKKNVFIIGATNRPDIIDPAVLRPGRLDQLIYIPLPDEASRHQILKASLRKTPLSKDLDLTFLAKNTVGFSGADLTEICQRACKLAIRESIEKEIRIEKERQDRQARGEELMEDDAVDPVPEITRAHFEEAMKFARRSVTDNDIRKYEMFAQTLQQSRGFGNNFKFPGEQRGSDAPSAPVPAQDDDDLYN

SEQ ID NO: 23269 - protein, 856 aa, Caenorhabditis elegans
MVREALERIQLVAKEENDEKMEEKEAMDDVQEIPIVKALETRKRKAPAAGRKSTGYGSGEIPTFGAQNSEKIASKLEIWVNFSEFFGLIVDYQGKFQFLVAKRTENSLNCIFFRKIRRKSLTKKQSTLESEKFKKDYGSSVFSCVNVEFLTARDQAAAAKEVVLSDDSEDERAARQLEKQIESLKTNRANKTVLNLYTKKSAPSTPVSTPKNQATKKPPGASAAPPALPRGLGAVSDTISPRESHVKFEHIGGADRQFLEVCRLAMHLKRPKTFATLGVDPPRGFIVHGPPGCGKTMFAQAVAGELAIPMLQLAATELVSGVSGETEEKIRRLFDTAKQNSPCILILDDIDAIAPRRETAQREMERRVVSQLCSSLDELVLPPREKPLKDQLTFGDDGSVAIIGDSPTAAGAGVLVIGTTSRPDAVDGGLRRAGRFENEISLGIPDETAREKILEKICKVNLAGDVTLKQIAKLTPGYVGADLQALIREAAKVAIDRVFDTIVVKNEGHKNLTVEQIKEELDRVLAWLQGDDDPSALSELNGGLQISFEDFERALSTIQPAAKREGFATVPDVSWDDIGALVEVRKQLEWSILYPIKRADDFAALGIDCRPQGILLCGPPGCGKTLLAKAVANETGMNFISVKGPELLNMYVGESERAVRTVFQRARDSQPCVIFFDEIDALVPKRSHGESSGGARLVNQLLTEMDGVEGRQKVFLIGATNRPDIVDAAILRPGRLDKILFVDFPSVEDRVDILRKSTKNGTRPMLGEDIDFHEIAQLPELAGFTGADLAALIHESSLLALQARVLENDESVKGVGMRHFREAASRIRPSVTEADRKKYEHMKKIYGLKQATPPSV

SEQ ID NO: 23270 - protein, 813 aa, Caenorhabditis elegans
MPGGMGFPSDPALLPRVQAHIRKFPGTKYFKPELVAYDLQQEHPEYQRKNHKVFMGMVREALERIQLVAKEENDEKMEEKEAMDDVQEIPIVKALETRKRKAPAAGRKSTGQAAAAKEVVLSDDSEDERAARQLEKQIESLKTNRANKTVLNLYTKKSAPSTPVSTPKNQATKKPPGASAAPPALPRGLGAVSDTISPRESHVKFEHIGGADRQFLEVCRLAMHLKRPKTFATLGVDPPRGFIVHGPPGCGKTMFAQAVAGELAIPMLQLAATELVSGVSGETEEKIRRLFDTAKQNSPCILILDDIDAIAPRRETAQREMERRVVSQLCSSLDELVLPPREKPLKDQLTFGDDGSVAIIGDSPTAAGAGVLVIGTTSRPDAVDGGLRRAGRFENEISLGIPDETAREKILEKICKVNLAGDVTLKQIAKLTPGYVGADLQALIREAAKVAIDRVFDTIVVKNEGHKNLTVEQIKEELDRVLAWLQGDDDPSALSELNGGLQISFEDFERALSTIQPAAKREGFATVPDVSWDDIGALVEVRKQLEWSILYPIKRADDFAALGIDCRPQGILLCGPPGCGKTLLAKAVANETGMNFISVKGPELLNMYVGESERAVRTVFQRARDSQPCVIFFDEIDALVPKRSHGESSGGARLVNQLLTEMDGVEGRQKVFLIGATNRPDIVDAAILRPGRLDKILFVDFPSVEDRVDILRKSTKNGTRPMLGEDIDFHEIAQLPELAGFTGADLAALIHESSLLALQARVLENDESVKGVGMRHFREAASRIRPSVTEADRKKYEHMKKIYGLKQATPPSV

SEQ ID NO: 23271 - protein, 813 aa, Caenorhabditis elegans
MPGGMGFPSDPALLPRVQAHIRKFPGTKYFKPELVAYDLQQEHPEYQRKNHKVFMGMVREALERIQLVAKEENDEKMEEKEAMDDVQEIPIVKALETRKRKAPAAGRKSTGQAAAAKEVVLSDDSEDERAARQLEKQIESLKTNRANKTVLNLYTKKSAPSTPVSTPKNQATKKPPGASAAPPALPRGLGAVSDTISPRESHVKFEHIGGADRQFLEVCRLAMHLKRPKTFATLGVDPPRGFIVHGPPGCGKTMFAQAVAGELAIPMLQLAATELVSGVSGETEEKIRRLFDTAKQNSPCILILDDIDAIAPRRETAQREMERRVVSQLCSSLDELVLPPREKPLKDQLTFGDDGSVAIIGDSPTAAGAGVLVIGTTSRPDAVDGRLRRTGRFQNEISLGIPDETAREKILEKICKVNLAGDVTLKQIAKLTPGYVGADLQALIREAAKVAIDRVFDTIVVKNEGHKNLTVEQIKEELDRVLAWLQGDDDPSALSELNGGLQISFEDFERALSTIQPAAKREGFATVPDVSWDDIGALVEVRKQLEWSILYPIKRADDFAALGIDCRPQGILLCGPPGCGKTLLAKAVANETGMNFFSVKGPELLNMYVGESERAVRTVFQRARDSQPCVIFFDEIDALVPKRSHGESSGGARLVNQLLTEMDGVEGRQKVFLIGATNRPDIVDAAILRPGRLDKILFVDFPSVEDRVDILRKSTKNGTRPMLGEDIDFHEIAQLPELAGFTGADLAVFIHELSLLALQARVLENDESVKGVGMRHFREAASRIRPSVTEADRKKYEHMKKIYGLKQATPPSV

SEQ ID NO: 23272 - protein, 724 aa, Caenorhabditis elegans
MSSAKKKPSLVTCPQCNAVVLTKDSLRHQDFCGKPVVESEIACAQNGTLRGFNVAVDKAEGFLPPDAVGWEKEHSILINQQTMESLGLLARQPVRIIHSSDSFIGIVWPCKEVALLKVSIISSRIARERMITLESCGRVEKLKSLSVTVKTSLTLNPALSGFLEAYLSHSYLQYNSSVDLKYLGQNVTVTPEEPIESKMSAMGIDDDKKRNSKVVSTAVGYKIQILNASAEGSTSDVLQTLPTDLSNIGGCFTAKQVLEDYVISPVRQKESPCSVLIWGLPGSGKTLLLKEVALVLSGSTTYIGSCEELMELNGVTTGNIVIVDVNELEKENTKANRALSFLLGDEKKCVILCVRSSETLDIGFRVRFPIEAEITVPTQDERLDILSKIGNIYNFPLELHLDVARHTHGFTGGDLCSLLKAAKFARGRTHLERVNDARKRIRPTGIRQFILEVPNVSWNDIGGNEELKLEIQQAVIWPQKHPEAFERFGIDPPAGILLYGPPGCSKTLIARALASEAKMNFLAVKGPELFSKWVGDSEKAIRDLFSRARQVAPTIVFFDEIDAVGSSRGSEKSSGVSDRVLAQLLTELDGLEKSSRVILLAATNRPDQLDSALLRPGRLDRAIYVGLPCEVTRRAILEMRTKKMKFDDTVRTIDKLVEKTSGYSGAELVAVCRTAAMFAMRESIDATIVQWTHFEQALAAVVSRTEAYLLEIYDDFKAGRASNA

SEQ ID NO: 23273 - protein, 720 aa, Caenorhabditis elegans
MVCREEFFKFYFRILFSKNEAKRIRKLLWNEEVELKIVVDQSGASINTLSIHPVTCWSLGILDSQLVKTSFTITTDHGKSSNIERVMKVQTSTSVKIGSLRISRCDVFNLFGPDLVKNVAVDNITPNFKFHETPIPISEDAKLSLMRQPSVAKNIRLEKHHLKQILKSANVFYKNDVIRITNYNAYTDKTTHLFYKLDVSSSPCIMDSSTAVYETSAVSQSLPFSNFLLKNSLTSSMRTTVFRMTQIYSAQKTISKKALVLLVTGASGSGKRLMSRVFASETHRNFFEVDGYEMVCENASTSEAKWTSWWEKAKLLQNCVLFIRNSNVLAIDQFNALDRRILQYMEQKLSEPSKITVIFSCNTDTMSSMPANVKNLALYTFSAEFMDENDRKTWLQYYLNEKLANHVAKKTSGFTLAELEKLVKNGKKVKIEEKEEKVYEDLIDKRNSNFADAIGAPKIPNVRWEDVGGLEETKQTVLESIRTNLFGSRALKRSGIILYGSPGCGKTLIAKAVATEFKIAFLSVKGPELLNKYVGQSEENLRKVFERAKQASPCVIFFDEIDSLAPNRGRNGDSGGVIDRIVSQLLAELDKLHNSPLTKVFVMGATNRPDLLDNSLMTPGRFDKLVEVKPGEDVESKTKILEAVSRKMRFEEDVDLREIASKVDEKMSGAQLFSIISNAGMAAIVETIQSIEDGKTENQSIRVAQRHLLESVKRFHETKY

SEQ ID NO: 23274 - protein, 996 aa, Caenorhabditis elegans
MNQSYPAFVSFHSLSNCFAYAKLLTAINNANDLSSANEKFGGPLLGNFRMKSCDNPNIYCDIQVFGQFPFTNVFINSVFAEVSGFHEKQEVILEKMESKTYCSHIEVAPRTEDDYSVIAQSQSSIENEFLNQIRLVSQNMIIPHFLSPGVYVQFRILNIVPASNKPVMLNNDTELHVQTVTEGSQNDEKATMAQKVSNIVQDLSMQGFLSNYVINLEKTPIIGRVLPKKTVELWVKSGLEKLDKSTIYIPGKESCLYSEHGIVEIRSQGRGENEERFQFFYLHRSPNIYLRNQSNELDASLSHMFESLQLENRCHCVEGTNTLEPYMNIKIFGVTQNRICTLRYCEIMMEKETFQWVKEFELTNVLTKSLHSELQGNPILLSVEGKELDVAVDDKAIRLKVVPSMKGLVKRVTENTCFLFDLTTELIFQQLGDLKQKHGDTENTRRRRKRTEEAEASEQIPQKPETSTMENFGFAQNKHFVQIGSHSKLLSELDKVCCGGKQHVMVLGGNGSGKTTFIKKLARRLSHNSSVTFCKMVPCALLKGRSADIIEKLLSDTLHEMEVKKPSCLFLDDFDVILPQIDQEQRHLAMEKVVSVFAQKLRTTEVSVVLVAQRLSSLNDGFVEQVMRARPIVSRKIELEQLTKEDRCEIFETFLDLPENSDIISEIVKKSDGYTFSEIEKLAVSINVECAIKGVKYITEIEVEKAFECFVAGKMGKIEDGQVLPTMEDVGGMFEQKKLLEQVIIWPRKYPQLFESVGVPVSKGILLHGPSGCGKTLLANATISNSNFSVVNVKGPELLSKYIGASEENVRLVFEKARSCAPCILFFDELDSLAPKRGHDSTGVTDRVVNQLLTELDGAEGGMKGVIILGCTSRIDLIDDALLRPGRFDHHVYCGHPEKTERLDIMKVLTNKLKPTDVDFECLAQKTDGWSGADLQLLFTNAQFYNARQIAKEEDGLEEDNVPIDQASIESVFNDSIPKPKRSQVDNRIGQKVTLA

SEQ ID NO: 23275 - protein, 607 aa, Nostoc punctiforme
MDDIFKGFEHLLEIAKALEEKVEKGELKTSIQIRSHNLSSIPRQGNIPRTSNSSRVRSNSTVGTTPMDDTDVTPPSARTNSKAAWQGIGGLADVLQEIRELVEIPLKRPDLLVKLGLEPPRGVLLVGPPGTGKTLTARVLAEELELNYIAINGPEVMSKYYGEAEARLRSIFEKATRSAPCLIFIDEIDSLAPDRSQVEGEVEKRLVAQLLGLMDGFAKTEGVLVLAATNRPDYLDPALRRPGRFDREVQFRVPDRDGRLEILTILTSAMPLETSVNLGAIADLAVGFVGADIKALCQKAAYIALRRQVPSLNSPVPENMTIVQQDFLEAIKEIKPSVLRDVAIEVPSVSWDDIGGLDDVKQKLQESVEGALLYPELYEQTKAKPPRGILLWGSPGTGKTLLAKAIASQARANFIAVNGPELLSRWVGAAEQAVRELFRKARQAAPCVVFIDEIDTLAPARGRFTGDSGVSDRVVGQLLTELDGLHECPKVLLVGATNRPEALDPALLRAGRLDLQIKIDLPDRASRLAILRVHNLDRPLVDVDLETWATVTEGWNGADLALLSNQAALSAIRRYRAQGLTDSSLIQITNDDFQVTYQMLANQHQSQ

SEQ ID NO: 23276 - protein, 737 aa, Halobacterium sp. NRC-1
MRLTVKQLKNRDPGSGMAVIDRDALQEIGVSSGDFVAIEGRNGGRTVARVWPSNTSDAGRGIIRIDGQLRQAANVSIDDRVEVEKTEVEPADRVTVSLPQNLQIRGDLGSHLREHLVDQAVRAGQTVAFPIGFGMFSGRSGRRIPLRVVDTQPSGTVVVQNTTEIEIADQSAQEVSVESGEPENTTAPALTYEDIGGLDDELEQVREMIELPMRHPELFGTLGIEPPKGVLLHGPPGTGKTLIAKAVANEIDAHFQTISGPEIMSKYYGESEEQLRDVFEEAEENAPAIVFIDELDSIAPKREDVSGDVERRVVAQLLSLMDGLEERGQLTVIGTTNRVDAVDPALRRPGRFDREIEIGVPDHDGREKILQIHTRGMPLGDGVDLDRYAENTQGFVGADLENLVKESAMHALRRIRPDLDLDEEEIPADILDSIEVTENDFKEALRGIEPSALREVFVEVPDVTWDHVGGLDDAKERLQETVQWPLEHADAYEQVALEPAKGVLLYGPPGTGKTLLAKAVANEANSNFISIKGPELFNKYVGESERGVREVFSKARENAPTVVFFDEIDAIASERGQGVGDSNVGERVVSQLLTELDGLEELEDIVVIATTNRPDLIDDALLRPGRLDRHVAVDEPDEAARREIFEIHTEDKPLAEDVDVDELVERTDGYVGADIEAVCREAATVAVREYVRATASAESANVDEIELSIEHFEQALEEVDSNAGSETQAFEKPAEAV

SEQ ID NO: 23277 - protein, 742 aa, Halobacterium sp. NRC-1
MNEVQLEVAKAYPNDSGRGIARLDPDTLLHLKLSPGDIIEIEGAETTAAKVWRADRQDWNTDTIRIDGFTRQNAEVGIGERVKIRKADAEKADTLVLAPPEEASVQFGSDAAGMVKRQILKRPVVARDIVPVMSSTNHPFMRSPGQAIPLIAVETEPEGVCLVTEDTDVELREEPISGFERTGGGITYEDIGGLENEIQRVREMVELPMKHPQIFQKLGIEPPQGVLLHGPPGTGKTLLAKAVANETSASFFSIAGPEIISKYYGESEQQLREIFEDAKDDSPSIIFIDELDSIAPKREDVTGEVERRVVAQLLTMMDGLEGRGQVIVIAATNRVDAVDPALRRPGRFDREIEIGVPDEIGREEILKIHTRGMPLSDDVNLSTLADDTHGFVGADIESLSKEAAMRALRRYLPEIDLDEEDIPPSLIDRMIVKREDFKGALSEVEPSAMREVLVELPKITWDDVGGLTEAKNNVKESVEWPLNQPEKFTRMGVEPPAGVLLYGPPGTGKTLMAKAVANETNANFISVRGPQLLSKWVGESEKAIRQTFRKARQVAPTVIFFDELDSLAPGRGQTGGNNVSERVVNQLLTELDGLEEMEEVMVIAATNRPDIIDPALIRSGRFDRLVQVGQPGIEGREQILKIHTQDTPLAADVSLRELAERADGYVGSDLANIAREAAIEALRDDEDADDVGMAHFRAAMENVRPTITDDLMEYYDQVEDQFKGSQGPNVNSRQGSEHIGFQ

SEQ ID NO: 23278 - protein, 759 aa, Halobacterium sp. NRC-1
MKLTVKPLKQKDAGRGLAAVDRDSMDELALENGDYVVIDGQGDHGRAVARVWPGYPEDDGDGVVRIDGRLRKEADVGIDDQVTVEPADIKPAGGVTVALPQNLRVRGNIAPMVRDRLNGRPVTAGQTIPISFGFGGMSTISGQQIPVKIAETEPSGTVVVSNDTEIQLSERPAEEIAPGAGEAAETGDPTPNVTYEDIGGLDGELEQVREMIELPMRHPELFQQLGIDPPKGVLLHGPPGTGKTLIAKAVANEIDAHFETISGPEIMSKYYGESEEKLREVFDEAEENAPAIVFVDELDSIAPKRGETQGDVERRVVAQLLSLMDGLEDRGDVTVIAATNRVDAIDPALRRGGRFDREIEIGVPDQDGRKEILQVHTRGMPLVEDIDLDDYAESTHGFVGADIESLAKEAAMNALRRVRPDIDLESDEIDAELLESISITEADFKRALNGIEPSALREVFVEVPDTTWADVGGLTDTKERLRETIQWPLDYPDVFSEMDLQSAKGVLLYGPPGTGKTLLAKAVANEANSNFISVKGPELLNKYVGESEKGVREVFEKARSNAPTVVFFDEIDAIAGQRGRATSDSGVGERVVSQLLTELDGIEALEDVVVVATSNRPDLIDDALLRPGRLDRHIHVPVPDADARRAILDVHTRDKPLADDVDLDVVAQRMDGFVGADVEALVREATMNATREFINSVDPADASDSVGNVRVTMAHFEAALGEVTASVDADVKENYEEIEQRFNTADTPTDDEPASGAFR

SEQ ID NO: 23279 - protein, 691 aa, Halobacterium sp. NRC-1
MTRVRVTLRDAADRTADAPAVGPGQLSFTAETRQQIGVAEGDAVTVTGSEDTVATVGPDTTAIAASSGLAGADVLRNVGPTDTVTVAPADPSPAAELTVAPATSSTLEGDADALARALAGRHLVADDRIAVPLFSGTVVVTLDVEDTTPGGPVTVTADTAITLTGHAADSGHADAEHATPADTRVGGLDDERGALRRLVVAPLVADSYAAIGVRPPAGVLVHGPAGTGKTTLVRAVAAAADLAVESVAPEDAGDRDALAAVLDAARDAEPGCVVFVESLAAAAPDPTADGASGRGSPSALGWLLDRVRGHDTVVVVGETTDPDAVDPALRRGGRFDAEVRVGVPDPAARRAILDVHTDGVRLADAVSLDAVADRTHGYTGADLTAVLVDAATRAAGSAAGPPVIRQRDLEAALDAVGPSTLRDASVQTPTTTYQDIGGLDRAKREVVRTVEWPQRYPALFERLDAAAPTGVLLHGPPGTGKTMLAKAVAASTDANFLSVDGPELMNRYVGESERGVRDLFERARRLAPAVVFLDEVDSLAPARHDTDTGASERVVSQLLTELDGLSPRGSVAVLAATNRRESVDPALLRPGRIETQVAVPIPDQDARAAIFEVQLDGVATGRIDTTALAAATTGYTGSDIAGVVREGALLAMEDHLRETEFDATDASGLVVTQRHLRRAIETTAPSVDGAG

SEQ ID NO: 23280 - protein, 394 aa, Halobacterium sp. NRC-1
MDVHFATVRSTNSSEGTLDVLIDGQAVTIEDNTEGDRSVGDLVEVWIDKGGRVAVEEVGRASPSVGVIREAIGGNEYLVERNGRVEVCESLDAENPEEGATVKIYGGKVTATISDEVIAPKGIEDRFGEQNRSKAYLKDPEEISEVDSGYDDVGGLTDTIEEVKDVVEIPLRESDKETNRFNKHGVEPDTGILFHGPPGTGKTLLAKAVAKETGSSIYLVNGPEIISKWYGETEDIIREIFSNAKKKKRAIIFIDEVDSIAPDRGDTKQFQRKIVAQLLTELDGFEPLNDVVVIGATNALNEVDSAIIRPGRFDRKIKFSKPTQTERMEIIEKITKDVDFGESVDLQLFAESTDGWTGADLSGVISRAVTISIRREGDLVTQDDLFRAIKGAGE

SEQ ID NO: 23281 - protein, 835 aa, Thermococcus kodakaraensis
MIFGKEDEKVDEIKLRVAEALKRDVGRGIVRFDRKYQRKLGVEPGDIVALKGERVTAAIVANAHPDDRGLDIIRMDGYIRRNAGVSIGDYVTVSRAEVQEAKKVVLAPAQKGVFIQIPGEIVKQNLLGRPVVKGDLVVAGGQNEAVYSPFDELLRGFFEAMPIGFGELKFVVVNTVPKGIVQITYNTEVEVLPQAVEVKEESIPEVTYEDIGGLSDAIQKIREMVELPLKHPELFERLGIEPPKGVLLYGPPGTGKTLLAKAVANEANAHFIAINGPEIMSKFYGESEERLREIFKEAEENAPSIIFIDEIDAIAPKREEVVGEVEKRVVSQLLTLMDGLKSRGKVIVIAATNRPDALDPALRRPGRFDREIEVGVPDKQGRKEILQIHTRGMPLEPDYDKEAVLRVLREIREKGNFDAERVDKIIAEVENAKNESEVKEALKKDAEIYSEVRNRLIDKMLDELAEVTHGFVGADLAALAREAAMVVLRRLIKEGKISPEQERIPPEVLQELRVRRDDFYEALKMVEPSALREVLIEVPNVRWEDIGGLEDVKQELREAVEWPLKYPKAFERLGIEPPKGILLYGPPGTGKTLLAKAVANESQANFIAIRGPEVLSKWVGETEKRIREIFRKARQAAPTVVFIDEIDAIAPARGSEGDRVTDRLINQLLTEMDGIQENSGVVVIGATNRPDIIDPALLRPGRFDRLILVPAPDEKARLEIFKVHTRRVPLAGDVDLRELAKKTEGYTGADIAALVREAALIAMRRIMRELPREVVESESEEFLERLKVSKKDFEMAMKKVKPSVTPYMMEYYRSFEENRKKQAGKERGGPDYYTF

SEQ ID NO: 23282 - protein, 801 aa, Drosophila melanogaster
MADSKGEDLATAILKRKDRPNRLIVEEAQNDDNSVVSLSQAKMDELQLFRGDTVILKGKRRKETVCIVLSDDTCPDEKIRMNRVVRNNLCVHLSDVVSVQSCPDVKYGKRVRILPIDESTEGVTGNLFEIYLKPYFLEAYRPIHMGDNFIVRAAMRPIEFKVVLTDPEPYCIVAPETVIFCDGDPIKREEEEESLNAVGYDDIGGCRKQLAQIKEMVELPLRHPSLFKAIGVKPPRGILMYGPPGTGKTLIARAVANETGAFFFLINGPEIMSKLAGESESNLRKAFEEAEKNSPAIIFIDEIDAIAPKRDKTHGEVERRIVSQLLTLMDGMKKSSHLIVMAATNRPNSIDPALRRFGRFDREIDIGIPDATGRLEVLRIHTKNMKLHDDVDLEQIAAESHGHVGADLASLCSEAALQQIREKMDLIDLEDDKIDAEVLASLAVTMENFRYAMTKSSPSALRETVVEVPNTTWTDIGGLESVKKELQELVQYPVEHPDKFLKFGMQPSRGVLFYGPPGCGKTLLAKAIANECQANFISVKGPELLTMWFGESEANVRDIFDKARSAAPCVLFFDELDSIAKARGGNVGDAGGAADRVINQILTEMDGMGAKKNVFIIGATNRPDIIDPAILRPGRLDQLIYIPLPDDKSREAILKANLRKSPLAKEVDLTYIAKVTQGFSGADLTEICQRACKLAIRQAIEAEIRREKERAENQNSAMDMDEDDPVPEITSAHFEEAMKFARRSVSDNDIRKYEMFAQTLQQSRGFGQNFRFPGQTGNTSGSGNNLPVNSPGDNGDDDLYS

SEQ ID NO: 23283 - protein, 801 aa, Drosophila melanogaster
MADSKGEDLATAILKRKDRPNRLIVEEAQNDDNSVVSLSQAKMDELQLFRGDTVILKGKRRKETVCIVLSDDTCPDEKIRMNRVVRNNLCVHLSDVVSVQSCPDVKYGKRVRILPIDESTEGVTGNLFEIYLKPYFLEAYRPIHMGDNFIVRAAMRPIEFKVVLTDPEPYCIVAPETVIFCDGDPIKREEEEESLNAVGYDDIGGCRKQLAQIKEMVELPLRHPSLFKAIGVKPPRGILMYGPPGTGKTLIARAVANETGAFFFLINGPEIMSKLAGESESNLRKAFEEAEKNSPAIIFIDEIDAIAPKRDKTHGEVERRIVSQLLTLMDGMKKSSHLIVMAATNRPNSIDPALRRFGRFDREIDIGIPDATGRLEVLRIHTKNMKLHDDVDLEQIAAESHGHVGADLASLCSEAALQQIREKMDLIDLEDDKIDAEVLASLAVTMENFRYAMTKSSPSALRETVVEVPNTTWTDIGGLESVKKELQELVQYPVEHPDKFLKFGMQPSRGVLFYGPPGCGKTLLAKAIANECQANFISVKGPELLTMWFGESEANVRDIFDKARSAAPCVLFFDELDSIAKARGGNVGDAGGAADRVINQILTEMDGMGAKKNVFIIGATNRPDIIDPAILRPGRLDQLIYIPLPDDKSREAILKANLRKSALAKEVDLTYIAKVTQGFSGADLTEICQRACKLAIRQAIEAEIRREKERAENQNSAMDMDEDDPVPEITSAHFQEAMKFARRSVSDNDIRKYEMFAQTLQQSRGFGQNFRFPGQTGNTSGSGNNLPVNSPGDNGDDDLYS

SEQ ID NO: 23284 - protein, 799 aa, Drosophila melanogaster
MADSKGEDLATAILKRKDRPNRLIVEEAQNDDNSVVSLSQAKMDELQLFRGDTVILKGKRRKETVCIVLSDDTCPDEKIRMNRVVRNNLCVHLSDVVSVQSCPDVKYGKRVRILPIDESTEGVTGNLFEIYLKPYFPRGLSAIHMGDNFIVRAAMRPIEFKVVLTDPEPYCIVAPETVIFCDGDPIKREEEEESLNAVGYDDIGGCRKQLAQIKEMVELPLRHPSLFKAIGVKPPRGILMYGPPGTGKTLIARAVANETGAFFFLINGPEIMSKLAGESESNLRKAFEEAEKNSPAIIFIDEIDAIAPKRDKTHGEVERRIVSQLLTLMDGMKKSSHLIVMAATNRPNSIDPALRRFGRFDREIDIGIPDATGRLEVLRIHTKNMKLHDDVDLEQIAAESHGHVGADLASLCSEAALQQIREKMDLIDLEDDKIDAEVLASLAVTMENFRYAMTKSSPSALRETVVEVPNTTWTDIGGLESVKKELQELVQYPVEHPDKFLKFGMQPSRGVLFYGPPGCGKTLPAKAIANECQANFISVKGPELLTMWFGESEANVRDIFDKGPSAAPCVLFFDELDSIAKSRCGNVGDCGAADRVINQILTEMDGMGAKKNVFIIGATNRPDIIDPAILRPGRLDQLIYIPLPDDKSREAILKANLRKFALAKEVDLTYIAKVTQGFSGADLTEICQRACKLAIRQAIEAEIRREKERAENQNSAMDDEDDPVPEITSAHFEEAMKFARRSVSDNDIRKYEMFAPDFEQSRGFGQNFRFPGQTGNTSGSGNNLPVNSPGDNGDDDLYS

SEQ ID NO: 23285 - protein, 815 aa, Plasmodium yoelii yoelii
MENNPDIKSLGDDNNGKIPKKKNLCRLIVEEATNDDNSVVALNTKRMEELNFFRGDTILIKGKKRHSTICIILNDNDLDEGKIRINKVARKNLRVCLGDIVYVKACPEIPYGKKIQVLPIDDTIEGLAKDTLFEIFLKPYFNESYRPVKKGDLFLVRGGFMSVEFKVVEVDPDDFCIVSPDTVIYYEGDPIKRDDEEKLDEIGYDDIGGCKKQLAQIREMIELPLRHPGLFKTLGVKPPRGVLLYGPPGSGKTCIARAVANETGAFFFLINGPEVMSKMAGEAEANLRRAFEEAEKNSPAIIFIDEIDSIAPKREKTNGEVERRVVSQLLTLMDGIKSRGQVVVIAATNRQNSIDPALRRFGRFDREIDIGVPDDNGRFEILRIHTKNMKLSPDVKLEELASNTHGFVGADLAQLCTEAALTCIREKMDVIDLEDEIIDKEVLESMCVTQDHFNMALGTCNPSSLRETVVEVPNVKWDDIGGLDEVKNTLREMILYPIDHPDKFEKFGMAPSRGVLFYGPPGCGKTLLAKAVASECSANFVSIKGPELLTMWFGESEANVREVFDKARAAAPCVLFFDELDSIGTQRGSSLGDGSGAGDRVMNQLLTEIDGVGPKKNLFFIGATNRPELLDEALLRPGRLDQLIYIPLPDLAARISILSAILRKCPVADNVPIDFLAQKTAGFSGADLAELCQRAARAAIRDAIDAEEMNKKSKLELNPEGNTENNQTNENQDTNNEESEIKYEITRHHFKEGLAGARRSVSQADLIKYDNFRIKFDPLYKTKSGGTNEDFIIDWPDEENNEDPQDYNVDDDLYS

SEQ ID NO: 23286 - protein, 1078 aa, Plasmodium yoelii yoelii
MFKENRINKNKKKQNDMFGQFAIVETDNETNKKNTDNEYNTKDCDITNKDLKLKDSEKLKFINDENIKYEKKHNQKVINTLKEEANLTDEKEVNLTDEKEVNLTDKNEVNLTDKNEVYLTDEKEANDSIFLNNKINDTMSKKENNSKSIINSFFQNIWGNSNTPKSRDQKNGGDKNGGDKNGGDKNGGDKNGGDKNGGDKNGGGQNGGGQNEKERPNGGGQSEGGPNGGSENETNFLLKALNSGKFPNYCLVENIDENADNFDIYMSKEKMRELNINDGFTVLLKGKKKKEMVAIAREDNRLSKYSVSISFSIKRNLRLMHNDIVKIYSLPNIKNIKNVILSPFNDTVNNITKEEIEKEILNTYLKNSYKPLSVDSTIYINYKNKRIELKVLNIITEDGQNEQHGSLTNTSILNLSETFLNREDYDQNTDDINYDDLGGMKKQLNKIRELIELPLKYPEIFVSIGISAPKGVLMHGIPGTGKTSIAKAIANESNAYCYIINGPEIMSKHIGESEQKLRKIFKKASEKTPCIIFIDEIDSIANKRNKSSNELEKRVVSQLLTLMDGLKKNNNVLVLAATNRPNSLDPALRRFGRFDREIEIPVPDEQGRYEILLTKTKKMKLDPDVNLRKIAKECHGYVGADLAQLCFEAAIQCIKEHIHFLDLEEEDFIEFMKLSVDGNINENNDNHKSENTYKNSNFKGGVKNFKNVFRLGNKNRTEQTSQNDKINMNKSGNKFDQKTKKIPSYILNKLTIKAKHFQHALNICNPSSLRERQVQIPTVTWDDIGGMQYVKEQLKETILYPLEYKHLYNKFNSNYNKGILLYGPPGCGKTLLAKAIANECNANFISVKGPELLTMWFGESEANVRDLFDKARAASPCIIFFDEIDSLAKERNSNNNNDASDRVINQILTEIDGINEKKTIFIIAATNRPDILDKALTRPGRLDKLIYISLPDFKSRCSIFKAILKNTPLNKDVDINDMAKRTEGFSGADITNLCQSAVNEAIKETIHLINLKKGKSNKNDKKKKSQGEQNYLENYDPVPTLSKKHFDVAFKNARISIQPEDVLKYEKFKEKLSLESSN

SEQ ID NO: 23287 - protein, 1034 aa, Plasmodium yoelii yoelii
MVKIKFFYYENVEEDEGGEIASDFNVYCTNDLFKLLDVKKNDNAIICHTNENKKGENENFYVYCCFKGIDEINTKSNVDRNCIYTNKYVLKSLNLDIEDEYKKKEKNIFLLNIKIIKSDSFVPIKELKLCINEIYNKVYDHLKDYCYSIDNNWNSNSMLENFWKNIKNKNFEKYINLSLLNTCLFPNNFIKISILGTCTFLSVLSLTIKKNNKNINFDTLLKQNVFQIPYIDQRTKIIIQKNDIEQMNFNENVDKNTNVDPNILTNTDFFPKKKGLNKIGGYKKIKEDIYYYILLPLLYKNIYDQFNIDVNKGVLFHGPPGCGKTFLALAIKEELIILQKKINSIKKKSNLSAQQMEIQINDQKESKSKKNNSIDVTSISTEIAKNDDIEFLIPDMEIFKSNDLIDNNNSGMKINELFLRCYKRYKEQKKCSIIFIDEIEILCEKRENSNINLYTTTLLNNMDGVRKNTHTILIGATNYINKLDLALRRSGRFDVEIEISLPNLKDRISILKKKLYNINHNINNKQIKKLADICQSFTCSDINSLINVSMYINLRENGVLSKNILNRSIKKKLAIKKTKNISEEENQTTSNKILNIDNNEINLIKNSEKKNNFNQNECVLKYDHITKGLKYVKPSGMKELYIDIPKTRIKDIGGYKIVKQCIKECLIYPKIYKKLYEKYNIQTPKGILLYGPPGCSKTLFAKAIASEINMNFISVKGPEIFSKYVGESEKTIRDIFKKARENSPCVIFFDEIDSIASNRNLNQNFVSNRVLCQLLNEIDGITIRADVIILGATNRPDLIDPAALRPGRFDRIIYVPLPNYKSRFSILKKTLKLYKISDVDNNGESLKMDNSIEQTQVEESENLQSQNEKHYFEGNIDSFNTKNMNPIKSEISKVIENNKFTNKINSIEKENEKYNSNDNNQKKPKRFTTKKREKINDNSQLLELCYFLAKKTKKYSGAEIVNICREASICALRETLKIYNTEKKGNKIDQNVLSTNSFVGLSKKHFIDVLKTIKPQTSSKLIKFYKNYNEQKKS

SEQ ID NO: 23288 - protein, 713 aa, Plasmodium yoelii yoelii
MDILFNSKDDTIDIYIFTYLLNLFNKTNIVIILLSINKPYDTILYSKIQKFISMPIPTYEDRIEILQNLSQNLEINFDVLYTASITYGFSRAQIYDILNESKNLFIYNYVLYGQNNDTPISSYFMDNNNNNNNSISINISTNEDNNYDKDLKIEDDDMSNNTTHYADEEKDSNLLKNNSPKCVNNQIENVINTNSLKNFKNGEEIEKVTNLTKRKERNNNDYLDIYIKEKKQKKIIPININNDIIYESIKNIKKKITTQNICEVPNINLDNIGSLKNIKKILETKFILPVKYSNIYKHLGINKSMGILLYGPPGCGKTMLAKAISNEMKANFIAIKGPEILNKYVGESEKKVREIFSYASTYKPCLIFFDEIDSICINRDNNKTAAASDRVVNQLLTEMDGLSQREGIYIIATTNRPDIIDKALLRTGRFDQLIYVSLPKYQGRIDILKKLSKNMPLDKDIDFKQISILTKGYSGADLHGVLRESAFIALQECRDKIDRFNYKHNGTASFVSPNIEQHRKNQQHRKNHQHCKNTKQNNNFTTSENTLNCVLNKNDTSSFESNNYYSTHILNDNNPKSLEHYNSENGQTTNNEISSNPNIMDQNICDVIQNKIMTIGDDNIKLGKIKMEERQKEEEGEGEENNNKDNFIYKIEDLKNDDLQEKDKNNLIYEFIQKNKNILAIKQKHIIKAINIVPRSVTKKQMKYYKEISKKFK

SEQ ID NO: 23289 - protein, 516 aa, Strongylocentrotus purpuratus
MSVDEICENTKMGREYALLGNYETSLVYYQGVLQQIQKLLTSVHEPQRKHQWQTIRQELSQEYEHVKNITKTLNGFKSEPAAPEPAPNHRAAPFSHHQHAAKPAAAEPARDPDVWPPPTPVDHRPSPPYQRAARKDPPRRSEPSKPANRAPGNDRGGRGPSDRRGDARSGGGGRGGARGSDKDKNRGGKSDKDKKAPSGEEGDEKKFDPAGYDKDLVENLERDIVQRNPNVHWADIAGLTEAKRLLEEAVVLPLWMPDYFKGIRRPWKGVLMVGPPGTGKTMLAKAVATECGTTFFNVSSASLTSKYHGESEKLVRLLFEMARFYAPSTIFIDEIDSICSKRGTGSEHEASRRVKSELLIQMDGVSGPSAGEESSKMVMVLAATNFPWDIDEALRRRLEKRIYIPLPEIDGREQLLRINLKEVPLADDIDLKSIAEKMDGYSGADITNVCRDASMMAMRRRIQGLRPEEIRHIPKEELNQPSTPADFLLALQKVSKSVGKEDLVKYMAWMEEFGSV

SEQ ID NO: 23290 - protein, 806 aa, Danio rerio
MASGGESKNDDLSTAILKQKNRPNRLIVDESINEDNSVVSLSQAKMDELQLFRGDTVLLKGKKRRETVCIVLSDDTCSDEKVRMNRVVRNNLRVRLGDVISIQPCPDVKYGKRIHVLPIDDTVEGITGNLFEVYLKPYFLEAYRPIRKGDIFLVRGGMRAVEFKVVETDPSPYCIVAPDTVIHCEGEPIKREDEEESLNEVGYDDIGGVRKQLAQIKEMVELPLRHPALFKAIGVKPPRGILLYGPPGTGKTLIARAVANETGAFFFLINGPEIMSKLAGESESNLRKAFEEAEKNAPAIIFIDELDAIAPKREKTHGEVERRIVSQLLTLMDGLKQRAHVIVMAATNRPNSIDPALRRFGRFDREVDIGIPDATGRLEILQIHTKNMKLADDVDLEQVANETHGHVGADLAALCSEAALQAIRKKMDLIDLEDETIDAEVMNSLAVTMDDFRWALSQSNPSALRETVVEVPNITWEDIGGLDDVKRELQELVQYPVEHPDKFLKFGMTPSKGVLFYGPPGCGKTLLAKAIANECQANFISIKGPELLTMWFGESEANVREIFDKARQAAPCVLFFDELDSIAKARGGNVGDGGGAADRVINQILTEMDGMSSKKNVFIIGATNRPDIIDPAILRPGRLDQLIYIPLPDEKSRIAILKANLRKSPISKDVDLDFLAKMTNGFSGADLTEICQRACKLAIRESIENEIRRERERQTNPSAMEVEEDDPVPEIRKDHFEEAMRFARRSVSDNDIRKYEMFAQTLQQSRGFGSFRFPSSNQGGSGPSQGSSGGGGGNVFNEDNDDDLYG

SEQ ID NO: 23291 - protein, 796 aa, Danio rerio
MKNRGGYNIDPRLKHRVHQYLKTRNDQYVDVSAMASELQQQFRIEYGRRNRTAFRIQVEKVFALICSESDSEFSALENKHLAKRARRSPEDGDGSHVTASSTDSEDDIPEHEHTNHMNSSLTSLYQRGAANASSSSTIQRSLSDDWIIDKTGDRGQESILIDLCEEESSSTTNQRDSSRLEKEKKSVKQKRQKKNKLEEDSETSAGVPAKKSKVKGFELQFSSVKFEDFGGSDETLEEVCKLLIHMRHPEVYQRLGVVPPRGFLLHGPPGCGKTLLAQAVAGETALPLLKISAPELVSGVSGESEQKLRELFEQAISSAPCILFIDEIDAITPKRETASKDMERRIVAQLLTCMDDLNSMLEPAQVLVIGATNRPDSLDPALRRAGRFDREICLGIPDEGARMKILKTLCRKIRLPDDFDFRHLARLTPGYVGADLMALCREAAMNAVNRILLEPTTEDQITPTLALARLLDLLKSSVSLSEDQLAALCVLMSDFSSSLVRVQPSAKREGFATVPDVTWADVGALQDVREELHMAIMAPIQNPEQFKALGLSAPAGLLLAGPPGCGKTLLAKAVANASGLNFISVKGPELLNMYVGESERAVRQVFQRGRNSAPCVIFFDEIDALCPRRSEHESGASVRVVNQLLTEMDGMENRRQVFIMAATNRPDIIDPAVLRPGRLDKTLYVGLPPAADRHAILNTITKGGTKPQLDSDVSLEEIAHDARCETFTGADLSALVREACVNALRVHLDPAQTHTESAKDIRVSRVHFEDAFKKVRPSVSKKDQLMYERLRETLSR

SEQ ID NO: 23292 - protein, 805 aa, Xenopus laevis
MASGSDTKSDDLSTAILKQKSRPNRLIVDESINEDNSMVSLSQAKMDELQLFRGDTVLLKGKKRREAVCIVLSDDTCSDEKIRMNRVVRNNLRVRLGDVISIQPCPDVKYGKRVHVLPIDDTVEGITGNLFEVYLKPYFLEAYRPIRKGDIFLVRGGMRAVEFKVVETDPSPYCIVAPDTVIHCEGEPIKREDEEESLNEVGYDDIGGCRKQLAQIKEMVELPLRHPALFKAIGVKPPRGILLYGPPGTGKTLIARAVANETGAFFFLINGPEIMSKLAGESESNLRKAFEEAEKNAPAIIFIDELDAIAPKREKTHGEVERRIVSQLLTLMDGLKQRAHVIVMAATNRPNSIDPALRRFGRFDREVDIGIPDSTGRLEILQIHTKNMKLSDDVDLEQVANETHGHVGADLAALCSEAALQAIRKKMDLIDLEDETIDAEVMNSLAVTMDDFRWALSQSNPSALRETVVEVPQVTWEDIGGLEDVKRELQELVQYPVEHPDKFLKFGMTPSKGVLFYGPPGCGKTLLAKAIANECQANFISIKGPELLTMWFGESEANVREIFDKARQAAPCVLFFDELDSIAKARGGNIGDGGGAADRVINQILTEMDGMSIKKNVFIIGATNRPDIIDPAILRPGRLDQLIYIPLPDEKSRMAILKANLRKSPVAKDVDVDFLAKMTNGFSGADLTEICQRACKLAIRESIENEIRRERDRQTNPSAMEVEEDDPVPEIRRDHFEEAMRFARRSVSDNDIRKYEMFAQTLQQSRGFGSFRFPAGGQSGAGPSPGAGGGSGGGHFTEEDDDLYG

SEQ ID NO: 23293 - protein, 805 aa, Xenopus laevis
MASGSDTKSDDLSTAILKQKSRPNRLIVDESINEDNSVVSLSQAKMDELQLFRGDTVLLKGKKRREAVCIVLSDDTCSDEKIRMNRVVRNNLRVRLGDVISIQPCPDVKYGKRVHVLPIDDTVEGITGNLFEVYLKPYFLEAYRPIRKGDIFLVRGGMRAVEFKVVETDPSPYCIVAPDTVIHCEGEPIKREDEEESLNEVGYDDIGGCRKQLAQIKEMVELPLRHPALFKAIGVKPPRGILLYGPPGTGKTLIARAVANETGAFFFLINGPEIMSKLAGESESNLRKAFEEAEKNAPAIIFIDELDAIAPKREKTHGEVERRIVSQLLTLMDGLKQRAHVIVMAATNRPNSIDPALRRFGRFDREVDIGIPDSTGRLEILQIHTKNMKLSDDVDLEQVANETHGHVGADLAALCSEAALQAIRKKMDLIDLEDETIDAEVMNSLAVTMDDFRWGLSQSNPSALRETVVEVPQVTWEDIGGLEDVKRELQELVQYPVEHPDKFLKFGMTPSKGVLFYGPPGCGKTLLAKAIANECQANFISIKGPELLTMWFGESEANVREIFDKARQAAPCVLFFDELDSIAKARGGNIGDGGGAADRVINQILTEMDGMSIKKNVFIIGATNRPDIIDPAILRPGRLDQLIYIPLPDEKSRMAILKANLRKSPVAKDVDVDFLAKMTNGFSGADLTEICQRACKLAIRESIENEIRRERDRQTNPSAMEVEEDDPVPEIRRDHFEEAMRLARRSVSDNDIRKYEMFAQTLQQSRGFGSFRFPAGGQSGAGPSPGAGGGSGGGHFTEEDDDLYG

SEQ ID NO: 23294 - protein, 854 aa, Xenopus laevis
MKNCPGSPGIDGRLKYRLTQYLSSNKCGGYVDIAVVAADLQKLYRADYGRRKQNAFRIQVEKVFKVISSETEGIDTLEGTHLAKRAKRGDDGNLEISSDSTDSDDYADQPSSNHMNNSLLSLYRKGNLDSVLETPVKNDLPDTSTPAHPTKNARMATVGTPQGTKTPEAGWFIDKTPSKAMEQSILIDLCEDGAEASAQNENPLDLSLLESEKKRKTPKTRNGRKSKSKANDVDAEIENRLLNDKGKGKVPEVQHSSLRFEDIGGNEDTLKEVCKMMIHMRHPEVYQHLGVVPPRGFLLHGPPGCGKTLLAQAIAGELDMPILKVAATEMVSGVSGESEQKLRELFDQAVSSAPCILFIDEIDSITPKREVASKDMERRIVAQLLTCMDDLNSLAVTTQVLVIGATNRPDSLDPALRRAGRFDREICLGIPDEGARKRILQTLCRKLKLPEPFDFCRLAHLTPGYVGADLMALCREAAMCAVNRVLIQIKDQQATTEAAVEETDPQPGAVALQAEKQTTAPAQNELHRLLALLQEQTPLPEAELLSLCIEMDDFLGALPMVQPSAKREGFATVPDVTWADIGALEEIREELTMAILAPVRNPEQFKALGLMAPAGVLLAGPPGCGKTLLAKAVANESGLNFISVKGPELLNMYVGESERAVRQVFQRATNSSPCVIFFDEIDALCPRRSGHDSGASVRVVNQLLTEMDGLESRRQVFIMAATNRPDIIDPAILRPGRLDKTLYVGLPPPADRFAILKTITKDGTRPPLEADVNLETIASDVRCDCFTGADLSALVREASISALRQEMLVQEPHTNPGQIKVSQRNFEEAFNKVKPSVSKKDQLMYELLRQSLSR

SEQ ID NO: 23295 - protein, 806 aa, Homo sapiens
MASGADSKGDDLSTAILKQKNRPNRLIVDEAINEDNSVVSLSQPKMDELQLFRGDTVLLKGKKRREAVCIVLSDDTCSDEKIRMNRVVRNNLRVRLGDVISIQPCPDVKYGKRIHVLPIDDTVEGITGNLFEVYLKPYFLEAYRPIRKGDIFLVRGGMRAVEFKVVETDPSPYCIVAPDTVIHCEGEPIKREDEEESLNEVGYDDIGGCRKQLAQIKEMVELPLRHPALFKAIGVKPPRGILLYGPPGTGKTLIARAVANETGAFFFLINGPEIMSKLAGESESNLRKAFEEAEKNAPAIIFIDELDAIAPKREKTHGEVERRIVSQLLTLMDGLKQRAHVIVMAATNRPNSIDPALRRFGRFDREVDIGIPDATGRLEILQIHTKNMKLADDVDLEQVANETHGHVGADLAALCSEAALQAIRKKMDLIDLEDETIDAEVMNSLAVTMDDFRWALSQSNPSALRETVVEVPQVTWEDIGGLEDVKRELQELVQYPVEHPDKFLKFGMTPSKGVLFYGPPGCGKTLLAKAIANECQANFISIKGPELLTMWFGESEANVREIFDKARQAAPCVLFFDELDSIAKARGGNIGDGGGAADRVINQILTEMDGMSTKKNVFIIGATNRPDIIDPAILRPGRLDQLIYIPLPDEKSRVAILKANLRKSPVAKDVDLEFLAKMTNGFSGADLTEICQRACKLAIRESIESEIRRERERQTNPSAMEVEEDDPVPEIRRDHFEEAMRFARRSVSDNDIRKYEMFAQTLQQSRGFGSFRFPSGNQGGAGPSQGSGGGTGGSVYTEDNDDDLYG

SEQ ID NO: 23296 - protein, 588 aa, Homo sapiens
MVELPLRHPALFKAIGVKPPRGILLYGPPGTGKTLIARAVANETGAFFFLINGPEIMSKLAGESESNLRKAFEEAEKNAPAIIFIDELDAIAPKREKTHGEVERRIVSQLLTLMDGLKQRAHVIVMAATNRPNSIDPALRRFGRFDREVDIGIPDATGRLEILQIHTKNMKLADDVDLEQVANETHGHVGADLAALCSEAALQAIRKKMDLIDLEDETIDAEVMNSLAVTMDDFRWALSQSNPSALRETVVEVPQVTWEDIGGLEDVKRELQELVQYPVEHPDKFLKFGMTPSKGVLFYGPPGCGKTLLAKAIANECQANFISIKGPELLTMWFGESEANVREIFDKARQAAPCVLFFDELDSIAKARGGNIGDGGGAADRVINQILTEMDGMSTKKNVFIIGATNRPDIIDPAILRPGRLDQLIYIPLPDEKSRVAILKANLRKSPVAKDVDLEFLAKMTNGFSGADLTEICQRACKLAIRESIESEIRRERERQTNPSAMEVEEDDPVPEIRRDHFEEAMRFARRSVSDNDIRKYEMFAQTLQQSRGFGSFRFPSGNQGGAGPSQGSGGGTGGSVYTEDNDDDLYG

SEQ ID NO: 23297 - protein, 431 aa, Homo sapiens
GRLEILQIHTKNMKLADDVDLEQVANETHGHVGADLAALCSEAALQAIRKKMDLIDLEDETIDAEVMNSLAVTMDDFRWALSQSNPSALRETVVEVPQVTWEDIGGLEDVKRELQELVQYPVEHPDKFLKFGMTPSKGVLFYGPPGCGKTLLAKAIANECQANFISIKGPELLTMWFGESEANVREIFDKARQAAPCVLFFDELDSIAKARGGNIGDGGGAADRVINQILTEMDGMSTKKNVFIIGATNRPDIIDPAILRPGRLDQLIYIPLPDEKSRVAILKANLRKSPVAKDVDLEFLAKMTNGFSGADLTEICQRACKLAIRESIESEIRRERERQTNPSAMEVEEDDPVPEIRRDHFEEAMRFARRSVSDNDIRKYEMFAQTLQQSRGFGSFRFPSGNQGGAGPSQGSGGGTGGSVYTEDNDDDLYG

SEQ ID NO: 23298 - protein, 893 aa, Homo sapiens
MSSKKNRKRLNQSAENGSSLPSAASSCAEARAPSAGSDFAATSGTLTVTNLLEKVDDKIPKTFQNPLIHLGLNTMKSANICIGRPVLLTSLNGKQEVYTAWPMAGFPGGKVGLSEMAQKNVGVRPGDAIQVQPLVGAVLQAEEMDVALSDKDMEINEEELTGCILRKLDGKIVLPGNFLYCTFYGRPYKLQVLRVKGADGMILGGPQSDPDTDAQRMAFEQSSMETSSLELSLQLSQLDLEDTQIPTSRSTPYKPIDDRITNKASDVLLDVTQSPGDGSGLMLEEVTGLKCNFESAREGNEQLTEEERLLKFSIGAKCNTDTFYFISSTTRVNFTEIDKNSKEQDNQFKVTYDMIGGLSSQLKAIREIIELPLKQPELFKSYGIPAPRGVLLYGPPGTGKTMIARAVANEVGAYVSVINGPEIISKFYGETEAKLRQIFAEATLRHPSIIFIDELDALCPKREGAQNEVEKRVVASLLTLMDGIGSEVSEGQVLVLGATNRPHALDAALRRPGRFDKEIEIGVPNAQDRLDILQKLLRRVPHLLTEAELLQLANSAHGYVGADLKVLCNEAGLCALRRILKKQPNLPDVKVAGLVKITLKDFFQAMNDIRPSAMREIAIDVPNVSWSDIGGLESIKLKLEQAVEWPLKHPESFIRMGIQPPKGVLLYGPPGCSKTMIAKALANESGLNFLAIKGPELMNKYVGESERAVRETFRKARAVAPSIIFFDELDALAVERGSSLGAGNVADRVLAQLLTEMDGIEQLKDVTILAATNRPDRIDKALMRPGRIDRIIYVPLPDAATRREIFKLQFHSMPVSNEVDLDELILQTDAYSGAEIVAVCREAALLALEEGIQANLIMKRHFTQALSTVTPRIPESLRRFYEDYQEKSGLRTL

SEQ ID NO: 23299 - protein, 744 aa, Ferroplasma acidarmanus
MKPNDGILLRIAEANATDPGMARVRLDEISRLDLDVEIGDVVAIEKVRSTVGRVFRSRPEDENKGIVRIDSVMRNNCGASIGDKVKVKKVEVEEAKKVVLAPIIRKDQKLRFGEGIDDFVQKALIRRPLIEQDSISVPGLTLAGHTGLLFKVIKTIPSKIPVEVSEETRVEIREDPASEVLEEVTKVSYEDIGGLSDQLGKIREIIELPLKHPELFERLGITPPKGVLLNGPPGTGKTLIAKAVANESGANFFAINGPEIMSKYYGQSEQKLREIFQKADESEPSIIFIDEIDSIAPKREDVQGEVERRVVAQLLTLMDGLKDRGHVIVIGATNRLDAVDPALRRPGRFDREIVIGVPDKKGRMEILTIHTRGMPLGMDDEKESEFFSRIADITYGFVGADLAALTRESAMNALRRYLPEIDLDKPIPTEVLEKMIVTEDDFMEALKTIEPSSLREVTVEVPNIKWNDIGGLEALKSELREAVELPLLNPDVFSRLGIRAPKGFLLYGPPGTGKTLLAKAVANESNANFISVKGPEVLSKWVGDSEKAVREIFKKAKQVSPAIIFMDEIDSIAPRRGTSMDSGVTERIVNQLLTSMDGIEVLKGVVVIAATNRPDIIDPALLRAGRFDKIIYIPPPEEEGRLKILEVHTRKMPLAKDVDLKDIARKTDGYVGADLENLCREAGMMAYRNNPEATEVNQDAFIKAMKTIRPSIDKNVTKFYSDLAATMGRDISEKKKTEDLGLYQ

SEQ ID NO: 23300 - protein, 373 aa, Ferroplasma acidarmanus
MLMTRSSTMTETKIDHVSLLIRKAIEEESSGNKNEAARTYKAAYKEVLEIASRSTGKIKQKRLEQAANLKKIYESIGGEAVEEDRISEGKKILGTLNIEPPEIPKVTFQDVAGLENVKTEIMSKIIYPMRYKELSQEYNIEFSGGMLLYGPPGTGKTFIVKAIANEVKANFINVNPSTLYSQWFGQFEKNISLLFRAAYLLSPSILFFDEIDTLVPKRSGSESDAARRGVSQLLTEVGGLTSQKDRNVFIIAATNNPWGIDEAIMRPGRFDVKIYIPPPDYESRKKIFQLKLSEVKHIDHIDYDELANKTERYSGADIEFICKKAVQNVFMEVIKTGNKIDVSTDDLLEVISQIRPSIDAGLLRKYQDYILNL

SEQ ID NO: 23301 - protein, 806 aa, Sus scrofa
MASGADSKGDDLSTAILKQKNRPNRLIVDEAINEDNSVVSLSQPKMDELQLFRGDTVLLKGKKRREAVCIVLSDDTCSDEKIRMNRVVRNNLRVHLGDVISIQPCPDVKYGKRIHVLPIDDTVEGITGNLFEVYLKPYFLEAYRPIRKGDIFLVRGGMRAVEFKVVETDPSPYCIVAPDTVIHCEGEPIKREDEEESLNEVGYDDIGGCRKQLAQIKEMVELPLRHPALFKAIGVKPPRGILLYGPPGTGKTLIARAVANETGAFFFLINGPEIMSKLAGESESNLRKAFEEAEKNAPAIIFIDELDAIAPKREKTHGEVERRIVSQLLTLMDGLKQRAHVIVMAATNRPNSIDPALRRFGRFDREVDIGIPDATGRLEILQIHTKNMKLADDVDLEQVANETHGHVGADLAALCSEAALQAIRKKMDLIDLEDETIDAEVMNSLAVTMDDFRWALSQSNPSALRETVVEVPQVTWEDIGGLEDVKRELQDLVQYPVEHPDKFLKFGMTPSKGVLFYGPPGCGKTLLAKAIANECQANFISIKGPELLTMWFGESEANVREIFDKARQAAPCVLFFDELDSIAKARGGNIGDGGGAADRVINQILTEMDGMSTKKNVFIIGATNRPDIIDPAILRPGRLDQLIYIPLPDEKSRVAILKANLRKSPVAKDVDLEFLAKMTNGFSGADLTEICQRACKLAIRESIESEIRRERERQTNPSAMEVEEDDPVPEIRRDHFEEAMRFARRSVSDNDIRKYEMFAQTLQQSRGFGSFRFPSGNQGGAGPSQGSGGGTGGSVYTEDNDDDLYG

SEQ ID NO: 23302 - protein, 256 aa, Saussurea medusa
MVRAPCFDKHGIKRGAWSQEEDNKLRAHIQRSGHSNWRQLPKLAGLSRCGKSCRLRWVNYLRPTIKHGNFTKDEKDVVVALHNKLGNKWSAIAARLPGRSDNEIKNYWHTHLKNRAQTDQTVLQTKQDGNAETSKGKGTPKAGCVVRKPNVKSQQEVEILLAVLSSASSSSFSSSTTSDQNESSPPSLSVSDANVTPQCSEEAARSLCIDQFLVEEDSIMLSSDKMYSPLGSVDYFISQDNVMDDVLLWPNLDFYY

SEQ ID NO: 23303 - protein, 184 aa, Lilium hybrid division I
MDRKVGTNEDVEVRKGPWTMEEDLILINYIANHGDGVWNTLARSAGLKRTGKSCRLRWLNYLRPDVRRGNITPEEQLLIMELHDRWGNRWSKIAKELPGRTDNEIKNFWRTRVQKKSKNGESSEGQISMLSDETSAMQMEDVDVGVSQTSYDQGQTSNNLDAFEIPFEPGDNLLSVEELWAMQY

SEQ ID NO: 23304 - protein, 113 aa, Zea luxurians
MGRRACCAKEGVKRGAWTSKEDDALAAYVKAHGEGKWREVPQKAGLRRCGKSCRLRWLNYLRPNIRRGNISYDEEDLIIRLHRILGNRWSLIAGRLPGRTDNEIKNYWNSTLV

SEQ ID NO: 23305 - protein, 113 aa, Zea luxurians
  unsure (1)..(113): unsure at all Xaa locations
MGRRACCAKEGVKRGAWTTKEDDALAAYVKAHGEGKWREVPQKAGLRRCGKSCRLRWLNYLRPNIRRGNISYDEEDLIIRLHKLLGNRWSLIAGRLPGRTDNEIKNYWXSTLV

SEQ ID NO: 23306 - protein, 113 aa, Zea luxurians
  unsure (1)..(113): unsure at all Xaa locations
MGRRACCAKEGVKRGAWTTKEDDALAAYVKAHGEGKWREVPXKAGLRRCGKSCRLRWLNYLRPNIRRGNISYDEEDLIIRLHKLLGNRWSLIAGRLPGRTDNEIKNYWNSTLV

SEQ ID NO: 23307 - protein, 367 aa, Dendrobium sp. XMW-2002-1
  unsure (1)..(367): unsure at all Xaa locations
MGRSPCCDKVGLKKGPWTPEEDQKLLAYIEKHGHGSWRALPNKAGLQRCGKSCRLRWTNYLRPDIKRGKFSMQEEQTIIQLHALLGNRWSAIATHLPKRTDNEIKNYWNTHLKKRLAKMGIDPITHKPKSDNLSSADGHSKCTANLNHMAQWESARLEAEARLVRESKLRSSSISXNTTTIFTSKNQPLLPPAVPMTPAASPCLDVLSAWQGAWTKPAANNSQGRGYTIDLESPTSTLSFSDNMMAPTISGMGLAEDSTREDQEWKCLRKTGFSMHTAAPFVSTEASSWLSESSGGDFAAGFTGMLSDKANEQNSEDGCNDSDNAECGSCVDVEESEGEEDENKNYWSSILNLVNSSSPPNSPPPVF

SEQ ID NO: 23308 - protein, 216 aa, Dendrobium sp. XMW-2002-8
MGRSPCCEKAHTNKGAWTKEEDERLVAYIKVHGEGCWRSLPKAAGLLRCGKSCRLRWINYLRPDLKRGNFTEEEDELIIKLHSLLGNKWSLIAGRLQGRTDNEIKNYWNTHIRRKLLSRGIDPTTHRPLHGQADASFVNEVEKVVSFRRREDENKSSNSSSSNSRSNSEEAKRWRCPDLNLELCISPPLQKQEDSEEDMMREEFGLCFTNGLLEFR

SEQ ID NO: 23309 - protein, 151 aa, Dendrobium sp. XMW-2002-9
MEEDGILINYIANHGEGVWNNLAKSAGLKRTGKSCRLRWLNYLRPDVRRGNITPEEQLLIMELHARWGNRWSKIARQLPGRTDNEIKNYWRTRIQKKVKNGDAVDYSSQMIIDEACTSHTSSIEEGMAQQNYPVHPNTNPEGYRLQTTRVN

SEQ ID NO: 23310 - protein, 220 aa, Dendrobium sp. XMW-2002-10
MGRSACCEKAHTNKGAWTKEEDERLIAHIRTHGEGCWRSLPKAAGLLRCGKSCRLRWINYLRPDLKRGNFTDEEDELIIKLHSLLGNKWSLIAGRLPGRTDNEIKNYWNTHIRRKLLNRGIDPATHRPVSTATASNLTMSFSSGSSVKDKRTSSSSSSSRVGRISALLPRCPDLNLDLCISPSLEEQMPQDLLVEESNCGGEFLRLGSSFLLDYRSLEMK

SEQ ID NO: 23311 - protein, 421 aa, Physcomitrella patens
MGRKPCCEKVGLRRGPWTSEEDQKLVSHITNNGLSCWRAIPKLAGLLRCGKSCRLRWTNYLRPDLKRGIFSEAEENLILDLHATLGNRWSRIAAQLPGRTDNEIKNYWNTRLKKRLRSQGLDPNTHLPLEDSKLDDTEDDTDDEGGDSSDVTMSDASKSEKRSKKKSKPKETVKVRQPKGPKPAPQLKMCQSDEGPVLLKVPKAPKSPISVNPGPGCNYDDDSEHSSSSTVTTKSHEDHRDSSDFIKALTSVSSFPEAELWSCIKPITNSFSSTALLSEWDSYRAFDSSLFPSSYPQLNSGLPKLEDVNSKSSAVASPVQGMLPAYNPMGMEMQTRMQFSSQLTHEIGQNYGGIFQETCYPQPDMGMSWSMHAELSHCGTESLFATPNPANAPSNFEEVPQPSPCTTSQELQRLAALLDLI

SEQ ID NO: 23312 - protein, 193 aa, Cucumis sativus
  unsure (1)..(193): unsure at all Xaa locations
TGDEGNNEYKKGLWTVEEDKILMDYVKAHGKGHWNRIAKKTGLKRCGKSCRLRWMNYLSPNVKRGNFTEQEEDLIIRLHKLPGNRWSLIAKRVPGRTDNQVKNYWNTHLSKKLGIKDQKTKQSNGDIVYQINLPNPTETSEETKISNIVDNNNILGDEIQEDHQGSNYLSSLWVHEDEFELSTLTNMMDFINX

SEQ ID NO: 23313 - protein, 367 aa, Arabidopsis thaliana
MKERQRWSGEEDALLRAYVRQFGPREWHLVSERMNKPLNRDAKSCLERWKNYLKPGIKKGSLTEEEQRLVIRLQEKHGNKWKKIAAEVPGRTAKRLGKWWEVFKEKQQREEKESNKRVEPIDESKYDRILESFAEKLVKERSNVVPAAAAAATVVMANSNGGFLHSEQQVQPPNPVIPPWLATSNNGNNVVARPPSVTLTLSPSTVAAAAPQPPIPWLQQQQPERAENGPGGLVLGSMMPSCSGSSESVFLSELVECCRELEEGHRAWADHKKEAAWRLRRLELQLESEKTCRQREKMEEIEAKMKALREEQKNAMEKIEGEYREQLVGLRRDAEAKDQKLADQWTSRHIRLTKFLEQQMGCRLDRP

SEQ ID NO: 23314 - protein, 187 aa, Fragaria x ananassa
MRKPCCEKTETTKGAWSIQEDQKLIDYIQKHGEGCWNSLPKAAGLRRCGKSCRLRWINYLRPDLKRGSFGEDEEDLIIRLHKLLGNRWSLIAGRLPGRTDNEVKNYWNSHLKKKILKTGTTLRPNKPHENNHAPNNKLVKLFNKMDDEVVDEVSSADSAAGCLVPELNLDLTLSIKTSTGMADPQVA

SEQ ID NO: 23315 - protein, 334 aa, Medicago truncatula
MSDMKDRQRWRAEEDALLRAYVKQYGPREWNLVSQRMNTPLNRDAKSCLERWKNYLKPGIKKGSLTEEEQRLVISLQATHGNKWKKIAAQVPGRTAKRLGKWWEVFKEKQQRETKGSINRTVDPINDSKYEHILESFAEKLVKERPSPSFVMAASNSSYLHTDAQAPTPGLLPSWLSNSNNAAPVRPNSPSVTLSLSPSTVAAPPPWMQPVRGPDNAPLVLGNVAPHGAVLSYGESMVMSELVDCCKELEEVHHALAAHKKEAAWRLSRVELQLESEKASRRREKMEEIEAKIKALREEQAVALDRIEGEYREQLAGLRRDAETKEQKLAEQWA

SEQ ID NO: 23316 - protein, 359 aa, Pisum sativum
MSLEMKDRQRWRAEEDALLRAYVKQYGPREWNLVSQRMNTPLNRDAKSCLERWKNYLKPGIKKGSLTEEEQHLVISLQATHGNKWKKIAAQVPGRTAKRLGKWWEVFKEKQQRETKGINKTVDPINDSKYEHILESFAEKLVKERPSPSFVMAASNSSYLHTDAQAATPGLLPSWLSNSNNTAPVRPNSPSVTLSLSPSTVAAPPPWMQPVRGPDNAPLVLGNVAPHGAVLSYGENMVMSELIDCCKELEEGHHALAAHKKEAAWRLSRVELQLESEKASRRREKMEEIEAKIKALREEQAVALDRIEGEYREQLAGLRRDAEAKEQKLAEQWAAKHLRLTKFLEQVGCRSRHAEQNGR

SEQ ID NO: 23317 - protein, 342 aa, Oryza sativa (japonica cultivar-group)
MQPPPMRERQRWRPEEDAILLAYVRQYGPREWSLVSQRMNRPLHRDAKSCLERWKNYLRPGIKKGSLTDDEQRLVIRLQAKHGNKWKKIAAEVPGRTAKRLGKWWEVFKEKQQRELRDRDRRRLPPPLDGDERGCAGGRYDWLLEDFADKLVNDHHRRMMAAPILPPWMSSSPSSSSSPSVTLSLASAAVAPAPAAPPPTWGGGGGGEVVVAELMECCREMEEGQRAWAAHRKEAAWRMKRVEMQLETERACRRREATEEFEAKMRALREEQAAAVERVEAEYREKMAGLRRDAEAKEQKMAEQWAAKHARLAKFLDQVAACRRWPPVEINGGGGGGPGGGR

SEQ ID NO: 23318 - protein, 337 aa, Oryza sativa (japonica cultivar-group)
MRERQRWRPEEDAILLAYVRQYGPREWSLVSQRMNRPLHRDAKSCLERWKNYLRPGIKKGSLTDDEQRLVIRLQAKHGNKWKKIAAEVPGRTAKRLGKWWEVFKEKQQRELRDRDRRRLPPPLDGDERGCAGGRYDWLLEDFADKLVNDHHRRMMAAPILPPWMSSSPSSSSSPSVTLSLASAAVAPAPAAPPPTWGGGGGGEVVVAELMECCREMEEGQRAWAAHRKEAAWRMKRVEMQLETERACRRREATEEFEAKMRALREEQAAAVERVEAEYREKMAGLRRDAEAKEQKMAEQWAAKHARLAKFLDQVAACRRWPPVEINGGGGGGPGGGR

SEQ ID NO: 23319 - protein, 360 aa, Lycopersicon esculentum
MRERQRWRAEEDALLRAYVRQYGPKEWPLVSQRMNTPLNRDAKSCLERWKNYLKPGIKKGSLTEDEQRLVIQLQAKHGNKWKKIAAEVPGRTAKRLGKWWEVFKEKQQREQKENNKVVDPVDEGKYDHILETFAEKIVKERSVPGLLMATSNGGFLHADASTPTPQTLLPPWLSNSSAPSTVRSSSPSVTLSLSPSTVPPTPTPGIPWLQTDRGPDNAPLILSSFPHHSVAPCGENPFITELAECCKDLDEGHRTWTAHKKEAAWRLRRVELQLESEKASKVREKMEEIEAKMKALREEQKATLDRIEAEYKEQLAGLRRDAEAKEQKLAEQWTSKHMRLAKFLEQMGCQSRLAEPNGGR

SEQ ID NO: 23320 - protein, 182 aa, Nicotiana tabacum
FKEKQQREQKENNKVVDPVDEGKYDHILETFAEKIVKERSVPGLLMATSNGGFLHTDAPAPSPQTLLPPWLSNSTATSTVRSQSPSVTLSLSPSTVPPTPTPGIPWLQTDRGPENAPLILSSFPHHGVAPPCGENPFVTELAECCKELDEGHRAWAAHKKEAAWRLRRVELQLESEKTSKVR

SEQ ID NO: 23321 - protein, 255 aa, Petunia integrifolia
MSTSNASTSGVRKGAWTEEEDLLLRECIEKYGEGKWHLVPVRAGLNRCRKSCRLRWLNYLRPHIKRGDFSLDEVDLILRLHKLLGNRWSLVAGRLPGRTANDVKNYWNTHLRKKLIAPHDQKQESKNKAMKITENNIIKPRPQTFSRPAMNHVSCWNGKSCSKNTIDKNEGDTEIIKFSDEKQKPEESIDDGLQWWANLLANNIEIEELVSCNSPTLLHEETAPSVNAESSLTQGGGSGLSDFSVDIDDIWDLVS

SEQ ID NO: 23322 - protein, 255 aa, Petunia integrifolia
MSTSNASTSGVRKGAWTEEEDLLLRECIEKYGEGKWHLVPVRAGLNRCRKSCRLRWLNYLRPHIKGGDFSLDEVDLILRLHKLLGNRWSLIAGRLPGRTANDVKNYWNTHLRKKLIAPHDQKQESKNKAMKITENSIIKPRPRTFSRPAMNHVSCWNGKSCNKNTIDKNEGDTEIIKFGDEKQKPEESIVDGLQWWANLLANNIEIEELVSYNSPTLLHEETAPSVNAESSLTQEGGSGLSDFSVDIDDIWDLLS

SEQ ID NO: 23323 - protein, 215 aa, Solanum tuberosum
MKDKEVKTRMKRGFWKPEEDLILKNCVETHGEGNWATISEKSGLMRSGKSCRLRWKNYLRPNIKRGMMSEDEKDLIIRLHKLLGNRWSLIAGRLPGRTDNEVKNFWNTHLNNKRSCRGKKKHVKSKEANTQSTQGKMQEYPAETVSNQEVATKTVLDSWIEEMQDFNCSLLSPLTMNNMPFLEDEPFIPILDDIVLLEAFTSTGKEAWNEIQPFL

SEQ ID NO: 23324 - protein, 357 aa, Antirrhinum majus
MKERQRWRPEEDALLRAYVKEYGPRDWHLVTQRMNKPLNRDAKSCLERWKNYLKPGIKKESLTQEEQILVINLQAKHGNKWKKIAAEVPGRTAKRLGKWWEVFKEKKQREEKDNKKITEPIEEGKYDRILETFAEKIVKERVVSRIITMPPTSNSGFLQNDPSPHSAQSVLPPWLASSSMTTTIRPQSPSVTLSLSPSVVPPAPAIPWLHPDNTTHGPSNLSSLGVVAPFMGENHIVPELLECCRELEEGQRAWAAHRKEAAWRLKRVELQLESEKACRRREKMEEIEAKMKALREEQKASLDRIEAEYREQLAGLRREAEVKEQKLAEQWAAKHLRLTKFLEQTGYRSIAGELNGR

SEQ ID NO: 23325 - protein, 110 aa, Lolium perenne
MGRSPCCEKMGLKRGPWTAEEDKILVAHITSFGHGNWRALPKQAGLLRCGKSCRLRWINYLRPDIKRGNFSDEEEQSIIQLHQLLGNRWSAIAARLPGRTDNEIKNYWNT

SEQ ID NO: 23326 - protein, 343 aa, Oryza sativa
  unsure (1)..(343): unsure at all Xaa locations
MQPPPMRERQRWRPEEDAILLAYVRQYGPREWSLVSQRMNRPLHRDAKSCLERWKNYLRPGIKKGSLTDDEQRXLVIRLQAKHGNKWKKIAAEVPGRTAKRLGKWWEVFKEKQQRELRDRDRRRLPPPLDGDERGCAGGRYDWLLEDFADKLVNDHHRRMMAAPILPPWMSSSPSSSSSPSVTLSLASAAVAPAPAAPPPTWGGGGGGEVVVAELMECCREMEEGQRAWAAHRKEAAWRMKRVEMQLETERACRRREATEEFEAKMRALREEQAAAVERVEAEYREKMAGLRRDAEAKEQKMAEQWAAKHARLAKFLDQVAACRRWPPVEINGGGGGGPGGGR

SEQ ID NO: 23327 - protein, 132 aa, Oryza sativa
  unsure (1)..(132): unsure at all Xaa locations
XSARAFGENMVMSELAERRKELDEVHHALAGHMKEAAWRLSRVELQLESEKAGRRREKMEEIEAKIKALREEQTAALDRIEAEYREQLAGLRRDAESKEQKLAEQWAAKHLRLTKFLEQVGCRSRLTEPNGR

SEQ ID NO: 23328 - protein, 301 aa, Triticum aestivum
  unsure (1)..(301): unsure at all Xaa locations
MEMKERQRWRPEEDAILRSYVRQYGPREWNLVAQRMNVPLDRDAKSCLERWKNYLRPGIKKGSLTDDEQRLVIRLQAKHGNKWKKIAAEVPGRTAKRLGKWWEVFKEKQQREIRDSRRPPPEPSPDERGRYEWLLENFAEKLVKERQQVGVGATPLHHHLMAAPMLPPWMSSTATNGAPVSPAPPSPSVTLSLASAVVPPPTAAPWMQQQQQMAEDGAAFGFARPPPAPGMVPDAPQAALAELAECCRELDEGHRAWAAHRKEASWRLKRVELQLESERACRRREAAEEFEAKMRALWEEX

SEQ ID NO: 23329 - protein, 369 aa, Zea mays
MKERQRWRPEEDAVLRAYVRQYGPREWHLVSQRMNVALDRDAKSCLERWKNYLRPGIKKGSLTEEEQRLVIRLQAKHGNKWKKIAAEVPGRTAKRLGKWWEVFKEKQQRELRDSRRPPPEPSPDERGRYEWLLENFAEKLVGERPQQAAAAPSPLLMAAPVLPPWLSSNAGPAVAAAAVAHPPPRPPSPSVTLSLASAAVAPGPPAPAPWMPERAAADAAPYGFPSPPQHGGAAPPGMTVVDGQALAELAECCRELEEGRRAWATHRREAAWRLKRVEQQLEMEREMRRREVWEEFEAKMRTMRLEQAAAAERVERDHREKVAELRRDAQVKEEKMAEQWAAKHARVAKFVEQMGACSRSWSSATDMNC

SEQ ID NO: 23330 - protein, 370 aa, Zea mays
MKERQRWRPEEDAVLRAYVRQYGPREWHLVSQRMNVALDRDAKSCLERWKNYLRPGIKKGSLTEEEQRLVIRLQAKHGNKWKKIAAEVPGRTAKRLGKWWEVFKEKQQRELRDSRRPPPEPSPDERGRYEWLLENFAEKLVGERPQQAAAAPSPLLMAAPVLPPWLSSNAGPAAAAAAAVAHPPPRPPSPSVTLSLASAAVAPGPPAPAPWMPDRAAADAAPYGFPSPSQHGGAAPPGMAVVDGQALAELAECCRELEEGRRAWAAHRREAAWRLKRVEQQLEMEREMRRREVWEEFEAKMRTMRLEQAAAAERVERDHREKVAELRRDAQVKEEKMAEQWAAKHARVAKFVEQMGGCSRSWSSATDMNC

SEQ ID NO: 23331 - protein, 370 aa, Zea mays; identical to SEQ ID NO: 23330

SEQ ID NO: 23332 - protein, 308 aa, Zea mays
  unsure (1)..(308): unsure at all Xaa locations
MKERQRWRPEEDAVLRAYVRQYGPREWHLVSQRMNVALDRDAKSCLERWKNYLRPGIKKGSLTEEEQRLVIRLQAKHGNKWKKIAAEVPGRTAKRLGKWWEVFKEKQQRELRDSRRPPPEPSPDERGRYEWLLENFAEKLVGERPQQAAAAPSPLLMAAPVLPPWLSSNAGPAAAAAAAVAHPPPRPPSPSVTLSLASAAVAPGPPAPSPWMPDRAAADQAPYGFPSPPQHGGAAPPGMAVVDGQALAELAECCRELEEGRRAWATHRREAAWRLKRVEQQLEMEREMRRREVWEEFEAKMRTMRLEX

SEQ ID NO: 23333 - protein, 223 aa, Arabidopsis lyrata
MRIRRREEKENQEYKKGLWTVEEDNILMDYVLNHGTGQWNRIVRKTGLKRCGKSCRLRWMNYLSPNVNKGNFTEQEEDLIIRLHKLLGNRWSLIAKRVPGRTDNQVKNYWNTHLSKKLVGDYSSAVKTTGEDDDSLPSLFITAATTSCHHQQENVYENIAKRFDGVVSASYEDKPKQELAQNDVLMATTNDPSHYYGNNALWVHDDDFELSSLFTRNDEFCFW

SEQ ID NO: 23334 - protein, 256 aa, Arabis gemmifera
MEDYERNSNSPTHEEDSDVRKGPWTEDEDAILVNFVSIHGDARWNHIARSSGLKRTGKSCRLRWLNYLRPDVRRGNITLEEQFMILKLHSLWGNRWSKIAQYLPGRTDNEIKNYWRTRVQKQAKHLRCDVNSNLFKETMRNVWMPRLVERINAQSSPATCEPVESMITDPGQPIEEPIPVEPGFLQFNQQFVPASELSATSSNSPAETLSDVQGGVVNGSGSDPAGQTGFGEFNDWGCVGGDNIWTDEESFWFLQD

SEQ ID NO: 23335 - protein, 157 aa, Gossypium raimondii
NKGSWTAEEDRRLAKYIEIHGAKRWKTIAIKSGLNRCGKSCRLRWLNYLRPNIKRGNISDEEEDLIIRLHKLLGNRWSLIAGRLPGRTDNEIKNYWNSHLSKKMINHDVRTEQTSSLEQIVPYKAWETVQMEEEEVVKGSDEIENSEFSIDVDEFFD

SEQ ID NO: 23336 - protein, 184 aa, Gossypium raimondii
FDVNKGAWTAEEDRKLAEVIAVHGAKRWKTIPTIAGLNRCGKSCRLRWMNYLRPNIKRGNISDQEEDLILRLHKLLGNRWSLIAGRLPGRTDNEIKNYWNSHLSKKVNQKEKHSGASARQGCKFAQQRLVENAKEQVREENTSTGFEESNISFDVDDFFDFSKVDTRNFEWVNRFLEVDDGFKF

SEQ ID NO: 23337 - protein, 272 aa, Oryza sativa (indica cultivar-group)
MGRRACCAKEGMKRGAWTSKEDDVLASYIKSHGEGKWREVPQRAGLRRCGKSCRLRWLNYLRPNIKRGNIDDDEEELIVRLHTLLGNRWSLIAGRLPGRTDNEIKNYWNSTLSRKIGTAATAAAGSRGGSTPDTARATDAASSSSVVPPGQQQQPASRADTDTATAAAAAAATTTTVWAPKAVRCTRGFFFHDRETAPLAAAAPAPAGELGDGDDVDCDYYCSGSSSAATTTSSSSLPAVVEPCFSAGDDWMDDVRALASFLDTDDAWNLCA

SEQ ID NO: 23338 - protein, 333 aa, Craterostigma plantagineum
MNQQQVKVSKNNKQVNNCEDDDDSSDLRRGPWTVDEDFTLINYIAHHGEGRWNSLARFAGLKRTGKSCRLRWLNYLRPDVRRGNITLEEQLLILELHSRWGNRWSKIAQHLPGRTDNEIKNYWRTRVQKHAKQLKCDVNSKQFKDTMRYLWMPRLVERIQASATTDDGAPPAVASSPSSAMNTACYSAAMAAGDHRRQFMLMPQYYATTTTTHNNSMIAQENSSTVASSESFGSLSSELTAEANYANYHRVINGADHQQIDSSTTSYDWQNCAVGNNGNSDQLGMGFADDRRSNEQWMMMTDDVVDNGGSSDQDNNLWNVDDVWFLQQFSSCF

SEQ ID NO: 23339 - protein, 333 aa, Craterostigma plantagineum
MNQQQVKVSKNNKQVNNCEDDDDSSDLRRGPWTVDEDFTLINYIAHHGEGRWNSLARFAGLKRTGKSCRLRWLNYLRPDVRRGNITLEEQLLILELHSRWGNRWSKIAQHLPGRTDNEIKNYWRTRVQKHAKQLKCDVNSKQFKDTMRYLWMPRLVERIQASATTDDGAPPAVVSSPSSAMNTACYTTAMAAGDHRRQFMLMPQYYATTTTTHNNSMIAQENSSTVASSESFGSLSSELTAEANYANYHRVINGADHQQIDSSTTSYGWQNCAVGNNGNSDQLGMGFADDRRSNEQWMMMTDDVVDNGGSSDQDNNLWNVDDVWFLQQFSSCF

SEQ ID NO: 23340 - protein, 335 aa, Craterostigma plantagineum
MNQQQVVKVSKNKQINSEDDDDSSDLRRGPWTVDEDFTLINYIAHHGEGRWNSLARFAGLKRTGKSCRLRWLNYLRPDVRRGNITLEEQLLILELHSRWGNRWSKIAQHLPGRTDNEIKNYWRTRVQKHAKQLKCDVNSKQFKDTMRYLWMPRLVERIQRAATTDDGAPPLASSASSPSSAMNTACYSTAMAAGDHRRQFMLMPQYYAMTTHSNLMIAQENSSTVASSESFGSLSSELTEANYANYHQVINGADHQQIDSSTTTSYGWQNDFAINTVGNNGNSDQLGMGSVDDRRSNEQWMMMDDVDNGGSSDKDNNLLWNVDDVWFLQQFSSCF

SEQ ID NO: 23341 - protein, 333 aa, Ipomoea nil
MDGMFGFHSTPDYGSRALMSPENLMDCGYSYNGLISPSAPDRIPVFASDDPTATGSFPCSVVSEAASVAPDVYRRGGGGGRREDAAGEKEDDDDHGIGLIKAKIASHPSYPKLLEAYIDCQKVGAPPEIASFLDEIRRENDLFKHDSRVSTCFGDDPELDIFMETYCDILVKYKSDLSRPFDEAKTFLNKIETQLSNLCKDDGVVSSDDDEYSGGEAEEQDSAVKGEDRELKSRLLQKYGGHISSLKLEFSKKKKKGKLPKDARQILLEWWKGHYRWPYPTEDDKISLAELTGLDQKQINNWFINQRKRHWKPSEHMQLAVMDNLAGQFFTQD

SEQ ID NO: 23342 - protein, 398 aa, Arabidopsis thaliana
MEEYQHDNSTTPQRVSFLYSPISSSNKNDNTSDTNNNNNNNNSSNYGPGYNNTNNNNHHHQHMLFPHMSSLLPQTTENCFRSDHDQPNNNNNPSVKSEASSSRINHYSMLMRAIHNTQEANNNNNDNVSDVEAMKAKIIAHPHYSTLLQAYLDCQKIGAPPDVVDRITAARQDFEARQQRSTPSVSASSRDPELDQFMEAYCDMLVKYREELTRPIQEAMEFIRRIESQLSMLCQSPIHILNNPDGKSDNMGSSDEEQENNSGGETELPEIDPRAEDRELKNHLLKKYSGYLSSLKQELSKKKKKGKLPKEARQKLLTWWELHYKWPYPSESEKVALAESTGLDQKQINNWFINQRKRHWKPSEDMQFMVMDGLQHPHHAALYMDGHYMGDGPYRLGP

SEQ ID NO: 23343 - protein, 400 aa, Arabidopsis thaliana
MEEYQHDNSSTPQRVSFLYSPISSSNKNDNTSDTNNNNNNNNSSNYGPGYNNTNNNNHHHQHMLFPHMSSLLPQTTENCFRSDHDQPNNNNNNPSVKSEASSSRINHYSMLMRAIHNTQEANNNNNNDNVSDVEAMKAKIIAHPHYSTLLQAYLDCQKIGAPPDVVDRITAARQDFEARQQRSTPSVSASSRDPELDQFMEAYCDMLVKYREELTRPIQEAMEFIRRIESQLSMLCQSPIHILNNPDGKSDNMGSSDEEQENNSGGETELPEIDPRAEDRELKNHLLKKYSGYLSSLKQELSKKKKKGKLPKEARQKLLTWWELHYKWPYPSESEKVALAESTGLDQKQINNWFINQRKRHWKPSEDMQFMVMDGLQHPHHAALYMDGHYMGDGPYRLGP

SEQ ID NO: 23344 - protein, 400 aa, Arabidopsis thaliana
MEEYQHDNSSTPQRVSFLYSPISSSNKNDNTSDTNNNNNNNNSSNYGPGYNNTNNNNHHHQHMLFPHMSSLLPQTTDNCFRSDHDQPNNNNNNPSVKSEASSSRINHYSMLMRAIHNTQEANNNNNNDNVSDVEAMKAKIIAHPHYSTLLQAYLDCQKIGAPPDVVDRITAARQDFEARQQRSTPSVSASSRDPELDQFMEAYCDMLVKYREELTRPIQEAMEFIRRIESQLSMLCQSPIHILNNPDGKSDNMGSSDEEQENNSGGETELPEIDPRAEDRELKNHLLKKYSGYLSSLKQELSKKKKKGKLPKEARQKLLTWWELHYKWPYPSESEKVALAESTGLDQKQINNWFINQRKRHWKPSEDMQFMVMDGLQHPHHAALYMDGHYMGDGPYRLGP

SEQ ID NO: 23345 - protein, 382 aa, Arabidopsis thaliana
MESGSNSTSCPMAFAGDNSDGPMCPMMMMMPPIMTSHQHHGHDHQHQQQEHDGYAYQSHHQQSSSLFLQSLAPPQGTKNKVASSSSPSSCAPAYSLMEIHHNEIVAGGINPCSSSSSSASVKAKIMAHPHYHRLLAAYVNCQKVGAPPEVVARLEEACSSAAAAAASMGPTGCLGEDPGLDQFMEAYCEMLVKYEQELSKPFKEAMVFLQRVECQFKSLSLSSPSSFSGYGETAIDRNNNGSSEEEVDMNNEFVDPQAEDRELKGQLLRKYSGYLGSLKQEFMKKRKKGKLPKEARQQLLDWWSRHYKWPYPSEQQKLALAESTGLDQKQINNWFINQRKRHWKPSEDMQFVVMDATHPHHYFMDNVLGNPFPMDHISSTML

SEQ ID NO: 23346 - protein, 382 aa, Arabidopsis thaliana
MESGSNSTSCPMAFAGDNSDGPMCPMMMMMPPIMTSHQHHGHDHQHQQQEHDGYAYQSHHQQSSSLFLQSLAPPQGTKNKVASSSSPSSCAPAYSLMEIHHNEIVAGGINPCSSFSSSASVKAKIMAHPHYHRLLAAYVNCQKVGAPPEVVARLEEACSSAAAAAASMGPTGCLGEDPGLDQFMEAYCEMLVKYEQELSKPFKEAMVFLQRVECQFKSLSLSSPSSFSGYGETAIDRNNNGSSEEEVDMNNEFVDPQAEDRELKGQLLRKYSGYLGSLKQEFMKKRKKGKLPKEARQQLLDWWSRHYKWPYPSEQQKLALAESTGLDQKQINNWFINQRKRHWKPSEDMQFVVMDATHPHHYFMDNVLDNPFPMDHISSTML

SEQ ID NO: 23347 - protein, 326 aa, Arabidopsis thaliana
QSHHQQSSSLFLQSLAPPQGTKNKVASSSSPSSCAPAYSLMEIHHNEIVAGGINPCSSSSSSASVKAKIMAHPHYHRLLAAYVNCQKVGAPPEVVARLEEACSSAAAAAASMGPTGCLGEDPGLDQFMEAYCEMLVKYEQELSKPFKEAMVFLQRVECQFKSLSLSSPSSFSGYGETAIDRNNNGSSEEEVDMNNEFVDPQAEDRELKGQLLRKYSGYLGSLKQEFMKKRKKGKLPKEARQQLLDWWSRHYKWPYPSEQQKLALAESTGLDQKQINNWFINQRKRHWKPSEDMQFVVMDATHPHHYFMDNVLGNPFPMDHISSTML

SEQ ID NO: 23348 - protein, 377 aa, Arabidopsis thaliana
MESGSNSTSCPMAFAGDNSDGPMCPMMMMMPPIMTSHQHHGHDHQHQQQEHDGYAYQSHHQQSSSLFLQSLAPPQGTKNKVASSSSPSSCAPAYSLMEIHHNEIVAGGINPCSSSSSSASVKAKIMAHPHYHRLLAAYVNCQKVGAPPEVVARLEEACSSAAAAAASMGPTGCLGEDPGLDQFMEAYCEMLVKYEQELSKPFKEAMVFLQRVECQFKSLSLSSPSSFSAIDRNNNGSSEEEVDMNNEFVDPQAEDRELKGQLLRKYSGYLGSLKQEFMKKRKKGKLPKEARQQLLDWWSRHYKWPYPSEQQKLALAESTGLDQKQINNWFINQRKRHWKPSEDMQFVVMDATHPHHYFMDNVLGNPFPMDHISSTML

SEQ ID NO: 23349 - protein, 397 aa, Malus x domestica
MEDYNNQMDHESSGGRGNFLYASPNLGGNYGRAASDHQMGINTFHLQSSGGGGGGGSGDQCNFQSPGTHPINVKTEATTSQHGHQKFQYNNNNNSHLVSSSRGHQPVIHQLQNNFDLLNDDHSLSSNEVEAIKAKIIAHPQYSNLLEAYMDCQRVGAPSDVVARLSVARQEFEARQRSSGTSRETSKDPELDQFMEAYYDMLVKYREELTRPIQEAMDFMRRIETQLNMLGNNNNAPPLRIFSPSEDKCEGIGSSEEEQENSGGETEVPEIDPRAEDRELKNHLLRKYSGYLSSLKQELSKKKKKGKLPKDARQKLLSWWELHYKWPYPSESEKVALAESTGLDQKQINNWFINQRKRHWKPSEDMQFMVMDGLHPQNAALYMDGHYIGDGHYRLGP

SEQ ID NO: 23350 - protein, 398 aa, Malus x domestica
MEDYNNQMDHESSGGRGNFLYASPNLGGNYGRAASDHQMGINTFHLQSSGGGGGGGSGDQCNFQSPGTHPINVKTEATTSQHGHPKFQYNNNNNNHHLVSSSRGHQPVVHQLQHNLDLQNDDHSLSSNEVEAIKAKIIAHPQYSNLVEAYMDCQRVGAPSDVVPRLSVARQEFEARQRSSGTSRETSKDPELDQFMEAYYDMLVKYREELTRPIQEAMDFMRRIETQLNMLGNNNNAPPLRIFSPSEDKCEGIGSSEDEQENSGGETEVPEIDPRAEDRELKNHLLRKYSGYLSSLKQELSKKKKKGKLPKEARQKLLSWWELHYKWPYPSESEKVALAESTGLDQKQINNWFINQRKRHWKPSEDMQFMVMDGLHPQNAALYMDGHYTGDVHYRLGP

SEQ ID NO: 23351 - protein, 381 aa, Glycine max
  unsure (1)..(381): unsure at all Xaa locations
MEEYTNNNHLSENTGPSPSTPRPNFLYSSASGGNHNHNHHQHHFPINTFHLQSGGSDHCFQSDQVSPHHSVKSEASTSQLHAPIFHYXXLMRGNLHNTMHHHHPQQQQGGSPTSSTGEVEAIKAKIIAHPQYSNLLEAYMFNLXIGAPPEVVARMAAAKQEFEARQRSSVGSRETSKDPELDQFMEAYYDMLVKYREELTRPIQEAMDFMRRIETQLNMLCNGPVRIFSDDKCEGAGSSEEDQDNSGGETELPEIDPRAEDRELKNHLLKKYSGYLSSLKQELSKKKKKGKLPKDARQKLLNWWELHYKWPYPSESEKVALAESTGLDQKQINNWFINQRKRHWKPSEDMQFMVMDGLHPQSATLYMDGHYMADGHYRLGP

SEQ ID NO: 23352 - protein, 378 aa, Glycine max
QAKAMEGSSCSNDTSYLLAFGENSGGLCPMTMMPLVTSHHATNPSNPSNNTNNNENTNCLFIPNCSNSSGTPSIMLHNNNTDDDNNKTSTNTGLGYYFMESDHHHRNNNNNGSSSSSSSSAVKAKIMAHPHYHRLLAAYVNCQKVGAPPEVVARLEEACASAVTMAGDAAAAAGSSCIGEDPALDQFMEAYCEMLTKYEQELSKPLKEAMLFLQRIECQFKNLTISSTDFACNEGAERNGSSEEDVDLHNMIDPQAEDRELKGQLLRKYSGYLGSLKQEFMKKRKKGKLPKEARQQLLEWWSRHYKWPYPSESQKLALAESTGLDQKQINNWFINQRKRHWKPSEDMQFVVMDPSHPHYYMDNVLGNPFPMDLSHPML

SEQ ID NO: 23353 - protein, 379 aa, Glycine max
MEGGSSSSNGTSYLLAFGENNSGGLCPMTMMPLVTSHHAGHHPINPSNNNNVNTNCLFIPNCSNSTGTPSIMLHNNHNNNKTDDDDNNNNTGLGYYFMESDHHHHHHGNNNNNGSSSSSSSSAVKAKIMAHPHYHRLLAAYVNCQKVGAPPEVVARLEEACASAATMAGGDAAAGSSCIGEDPALDQFMEAYCEMLTKYEQELSKPLKEAMLFLQRIECQFKNLTISSSDFASNEGGDRNGSSEEDVDLHNMIDPQAEDRDLKGQLLRKYSGYLGSLKQEFMKKRKKGKLPKEARQQLLEWWNRHYKWPYPSESQKLALAESTGLDQKQINNWFINQRKRHWKPSEDMQFVVMDPSHPHYYMDNVLGNPFPMDLSHPML

SEQ ID NO: 23354 - protein, 379 aa, Glycine max; identical to SEQ ID NO: 23353

SEQ ID NO: 23355 - protein, 379 aa, Glycine max; identical to SEQ ID NO: 23353

SEQ ID NO: 23356 - protein, 364 aa, Glycine max
  unsure (1)..(364): unsure at all Xaa locations
MGQEAMEGVISSKGMGFGENTSSSGVCPMMMMPLVTSHHVGHHPLNHPILNNPNPNEHTNTLFLPMPXXTNNNHHPNRNNHTTXNATELGYFMEIPNNNYDGGSSSPSSAVKAKIMAHPIRLELLAAYVNCQKVGAPPEVVGRLEEACASAAVIMAGGTASIGEDPALDQFMEAYCEMLIKYEQELSKPFKEAMLFLQRIECQFKSLTISSSLDTTACNEAIDRNGPSEDVDVQTNIIDPQAEDQELKGQLLRKYRGYLGSLKQEFTKKRKKGKLPKEARQQLLEWWSRHYKWPYPSESQKLALAESTGLDQKQINNWFINQRKRHWKPSEDMQFVVVDPSHPHYYMENVLGNPFPMDLSHPML

SEQ ID NO: 23357 - protein, 377 aa, Glycine max
  unsure (1)..(377): unsure at all Xaa locations
LTIHLSSLEFSTNKETKLNFGSTLWTIICSVLFLRKQXGGDXQLGTTDPSQRGFGGNSCSELSEMDMMNMETNNRKFLSLPLSNNNNNSGNAQMRSSSDNRRVPVTSNSNIAQEHHYSHHNPTDTCSVRDKIMAHPFLPRLLSSYLNCLKVGAPPEVVASLEESCAKCESFNASSGRTGGSIGEDPALDQFMEAYCEMLIKYEQELTKPFKEAMLFFSRIECQLKALAVSSDFGQXXETSSQNEVDVHENNLDSQAEDRELKVQLLRKYSGYLGSLKKEFLKKKKNGKLPKEARQQLLDWWNRHYKWPYPSESQKQALAESTGLDLKQINNWFINQRKRHWKPSEDMQFAVMDAXXNYYMENVMCKPFPMDGMPMLL

SEQ ID NO: 23358 - protein, 374 aa, Glycine max
  unsure (1)..(374): unsure at all Xaa locations
SXEGGEFHIHIDTYILFFHXGKENSELSCRDTRXPCVKPLCLHLHYSTHSNSTGSSSSSVCLRERERETTXXTLLMHRRKKIDYTIPRDNNNNSGDNXEGYLSLDSIAQEHHYSHHHNXXTDTCSVRDKIMAHPLFPRLLSSYLNCLKVGAPPEVVASLEESYAKYESFNASSGRIGGGSIGEDPALDQFMEAYCEMLIKYEQELTKPFKEAMLFFSRIECQLKALAVSSDFGQSETSSKNEVDVHENNLDSQAEDRELKVQLLRKYSGYLGSLKKEFLKKKKNGKLPKEARQQLLDWWNRHYKWPYPSESQKQALAESTGLDMKQINNWFINQRKRHWKPSEDMQFAVMDATNYYMENVMCKPFPMDSMPMLL

SEQ ID NO: 23359 - protein, 161 aa, Oryza sativa (indica cultivar-group)
MEELEGHRGEGRLPPPPPLLPFPKVSVQVYTVPSSSTAASAAAAGGARQAVAPATRDGGGRAAGVLDDPVKARIVSHPRYHRLLAAFLDCHKVGCPAEAAEEIAAAARVREARQRAAAAASRMPPAPEDPELDQFMEDYCKLLVECKEELSRPLQEAEEFL

SEQ ID NO: 23360 - protein, 164 aa, Oryza sativa (indica cultivar-group)
MEELEGHRGEGRLPPPPPLLPFPKVSVQVYTVPSSSTAASAAAAGGARQAVAPATRDGGDGGGRAAGVLDDPVKARIVSHPRYHRLLAAFLDCHKVGCPAETAEEIAAAARVREARQRAAAAASRMPPAPEDPELDQFMEDYCKLLVECKEELSRPLQEAEEFL

SEQ ID NO: 23361 - protein, 355 aa, Oryza sativa (japonica cultivar-group)
MDQSFGNLGGGGGAGGSGKAAASSFLQLPLSTAAAATAYYGTPLALHQAAAAAGPSQYHGHGHPHHGGGHHHSKHGGAGGGEISAAEAESIKAKIMAHPQYSALLAAYLDCQKVGAPPEVLERLTATAAKLDARPPGRHDARDPELDQFMEAYCNMLAKYREELTRPIDEAMEFLKRVESQLDTIAGGAHGGGAGSARLLLADGKSECVGSSEDDMDPSGRENEPPEIDPRAEDKELKFQLLKKYSGYLSSLRQEFSKKKKKGKLPKEARQKLLHWWELHYKWPYPSETEKIALAESTGLDQKQINNWFINQRKRHWKPSEDMPFVMMEGFHPQNAAALYMDGPFMADGMYRLGS

SEQ ID NO: 23362 - protein, 355 aa, Oryza sativa (japonica cultivar-group)
MDQSFGNLGGGGGAGGSGKAAASSFLQLPLSTAAAATAYYGTPLALHQAAAAAGPSQYHGHGHPHHGGGHHHSKHGGAGGGEISAAEAESIKAKIMAHPQYSALLAAYLDCQKVGAPPEVLERLTATAAKLDARPPGRHDARDPELDQFMEAYCNMLAKYREELTRPIDEAMEFLKRVESQLDTIAGGAHGGGAGSARLLLADGKSECVGSSEDDMDPSGRENEPPEIDPRAEDKELKFQLLKKYSGYLSSLRQEFSKKKKKGKLPKEARQKLLHWWELHYKWPYPSETEKIALAESTGLDQKQINNWFINQRKRHWKPSEDMPFVMMEGFPPQNAAALYMDGPFMADGMYRLGS

SEQ ID NO: 23363 - protein, 412 aa, Oryza sativa (japonica cultivar-group)
MDQSFGNLGGGGGAGGSGKAAASSFLQLPLSTAAAATAYYGTPLALHQAAAAAGPSQYHGHGHPHHGGGHHHSKHGGAGGGEISAAEAESIKAKIMAHPQYSALLAAYLDCQKVGAPPEVLERLTATAAKLDARPPGRHDARDPELDQFMEAYCNMLAKYREELTRPIDEAMEFLKRVESQLDTIAGGAHGGGAGSARLLLAGKSTNHPSPSSCSRLRFYFYLHTCSFCFFSSAAAAAADDDDLVVGGDGGGGGGGGLPHCKSECVGSSEDDMDPSGRENEPPEIDPRAEDKELKFQLLKKYSGYLSSLRQEFSKKKKKGKLPKEARQKLLHWWELHYKWPYPSETEKIALAESTGLDQKQINNWFINQRKRHWKPSEDMPFVMMEGFHPQNAAALYMDGPFMADGMYRLGS

SEQ ID NO: 23364 - protein, 355 aa, Lycopersicon esculentum
MENNNYNNHVSGENSGGQRGHFFYGGNQVLGGAAPIYGRGGDCYDPMIVKTEGGGSTSHHNHTFHYPSIIRNHHHDSTETSGGGAGAGEVIEALKAKIIAHPQCSNLLDAYMDCQKVGAPPEVAARLSAVRQEFEARQRRSLTDRDVSKDPELDQFMEAYYDMLVKYREELTRPLQEAMEFMQKIEAQLNMLGNAPVRIFNSEDKCEGVGSSEEDQDNSGGETELPEIDPRAEDRELKNHLLRKYSGYLSSLKQELSKKKKKGKLPKDARQKLITWWELHYKWPYPSESEKVALAESTGLDQKQINNWFINQRKRHWKPSEDMQFMVMDGLHPQSAAALYMEGHYMGEGPFRLGQ

SEQ ID NO: 23365 - protein, 355 aa, Lycopersicon esculentum
MEGGSSGNTSTSCLMMMGYGDHENNNNNNGNGNGNGNGNVTICAPPMMMMMPPPPPSLTNNNNAETSNNNILFLPFMDNNNNNNPQEDNNSSSSSIKSKIMAHPHYHRLLTAYLNCQKIGAPPEVVARLEEICATSATMGRSSSSSGGGIIGEDPALDQFMEAYCEMLTKYEQELSKPFKEAMVFLSRIECQFKALTLAPNSSHESALGEAMDRNGSSDEEVDVNNSFIDPQAEDRELKGQLLRKYSGYLGSLKQEFMKKRKKGKLPKEARQQLVDWWLRHIKWPYPSESQKLALAESTGLDQKQINNWFINQRKRHWKPSEDMQFVVMDAAHPHYYMDNVLANHFPMDMTPSLL

SEQ ID NO: 23366 - protein, 354 aa, Lycopersicon esculentum
MEGGSSGNTSTSCLMMMGYGDHENNNNNNGNGNGNGNGNVTICAPPMMMMMPPPPPSLTNNNNAETSSNNILFLPFMDNNNNNPQEDNNSSSSSIKSKIMLNPHYHRLLTAYLNCQKIGAPPEVVARLEEICATSATMGRSSSSSGGGIIGEDPALDQFMEAYCEMLTKYEQELSKPFKEAMVFLSRIECQFKALTLAPNSSHESALGEAMDRNGSSDEEVDVNNSFIDPQAEDRELKGQLLRKYSGYLGSLKQEFMKKRKKGKLPKEARQQLVDWWLRHIKWPYPSESQKLALAESTGLDQKQINNWFINQRKRHWKPSEDMQFVVMDAAHPHYYMDNVLANHFPMDMTPSLL

SEQ ID NO: 23367 - protein, 356 aa, Nicotiana tabacum
MENNYNQLGENSSQRGNNFLYGGIPLLSSPNSSYLWKNKWRRRRSDCYDQSQAVVHPIVKTEGGSSTSHHHHTFQYPSIIRSGYHHQTVQNHHESESSGSEVDALKAKIIAHPQCSNLLDAYMDCQKVGAPPEVVARLSAVRQEFEVRQRDSSTDRDVSKDPELDQFMEAYYDMLVKYREELTRPLHEAMDFMRKIETQLNMLEDKCEGVGSSEEEQDNSGGETEIPEIDPRAEDRELKNHLLRKYSGYLSSLKQELSKKKKKGKLPKDARQKLLSWWELHYKWPYPSESEKVALAETTGLDQKQINNWFINQRKRHWKPSEDMQFMVMDGLHPQNAAALYMEGHYMGEGPFRLGQ

SEQ ID NO: 23368 - protein, 342 aa, Nicotiana tabacum
MGGGGSSGNTSSCLMGYGDDNNNNNSGNAALCPPPMMMPPPPINNNNGESSNNIGGNNNNNILFLPFMANNNNNPHEDANCSSSSSIKSKIMAHPHYPRLLSAYVNCQKIGAPPEVVARLEEVCATSATIGRNSGGIIGEDPALDQFMEAYCEMLTKYEQELSKPFKEAMVFLSRIECQFKALTLTSSSESVAALGEAIDRNGSSEEEVDVNNGFIDPQAEDQELKGQLLRKYSGYLGSLKQEFMKKRKKGKLPKEARQQLLDWWTRHYKWPYPSESQKLALAESTGLDQKQINNWFINQRKRHWKPSEDMQFVVMDAAHPHYYMDNVLGNPFPMDITPTLL

SEQ ID NO: 23369 - protein, 343 aa, Nicotiana tabacum
MEGGGSSGNTSCLMGYNGDDNNNNSGNAALCPPPMMMMMMPPPINNNNAESSNNIGGNNNNNILFLPFMDNNNNNPHEDANCSSTSIKSKIMAHPHYPRLLSAYVNCQKIGAPPEVVARLEEVCATSATIGRNSGGIIGEDPALDQFMEAYCEMLTKYEQELSKPFKEAMVFLSRIECQFKALTLTSSSESVAALGEAIDRNGNGSSEEVDVNNGFIDLQAEDQELKGQLLRKYSGYLGSLKQEFMKKRKKGKLPKEARQQLLDWWTRHYKWPYPSESQKLALAESTGLDQKQINNWFINQRKRHWKPSEDMQFVVMDAAHPHYYMDNVLGNPFPMDITPTLL

SEQ ID NO: 23370 - protein, 358 aa, Helianthus annuus
MEDYLGQNSSSSNTGTTSTTFLYGSGGVAPDTSCLYGRGGNESDPGHGGFHHPDQYHHPMVKIETEKFHNYPPSMVNFHNEDEALKAKIISHPHYSNLLQAYMDCQKVGAPPEVVGRLTAVRQEYEARQRANLGCRENYKDPELDQFMEAYYDMLIKYKEELTRPIQEAMEFMRRIESQLSTLTISSSSSSSPAGRIFISPDESKCEVIGSSDEEQENTSGGETEVAEIDPRAEDRELKNHLLRKYSGYLSSLKQELSKKKKKGKLPKEARQKLLSWWELHYKWPYPSESEKVALAESTGLDQKQINNWFINQRKRHWKPSEDMQFMVMDGLHPQNVATALYMGDHHYMGDGPYRLGP

SEQ ID NO: 23371 - protein, 362 aa, Helianthus annuus
MESDGDGGGTSSCLMSFGDTTNNINNNSSNNNNSNNNIGSLCLPPNPPGAYNTTTNNNNLIFSDHHPSAMMLEDNNININDGVGLAFMNPSSSVKAKIMSHPHYPRLLSAYLNCQKIGAPPEVVERLEEACRASVVAAMSSCSGGAGTSDGSGGGMNMIIGQDPALDQFMEAYCEMLIKYEQELSKPFKEAMLFLSRIESQFKAISISTSDSAGGEGGMDKNGSSEEEVDVNNNLIDPQAEDRELKGQLLRKYSGYLGSLKQEFMKKRKKGKLPKEARQQLLDWWTRHYKWPYPSEAQKLALAESTGLDQKQINNWFINQRKRHWKPSEDMQFVVMDAAHPHYFMENMNILGNPYPMDVSLL

SEQ ID NO: 23372 - protein, 189 aa, Helianthus annuus
CEMLIKYEQELSKPFKEAMLFLSRMESQFKAITFSNSDSGCGEGGMDRNGSSEEELDVDMNNGVVDPQAEDRELKGQLLRKYSGYLGSLKQEFMKKRKKGKLPKEARQQLLDWWTRHYKWPYPSEAQKLALAESTGLDQKQINNWFINQRKRHWKPSEDMQFVVMDAAHPHYFIDNIFGNPYPMDVSLL

SEQ ID NO: 23373 - protein, 355 aa, Oryza sativa; identical to SEQ ID NO: 23361

SEQ ID NO: 23374 - protein, 357 aa, Oryza sativa
MDQSFGNLGGGGAGGSGKAAASSFLQLPLSTAAAATAYYGTPLALHQAAAAAGPSQYHGHGHPHHGGGHHHSKHGGAGGGEISAAEAESIKAKIMAHPQYSALLAAYLDCQKVGAPPEVLERLTATAAKLDARPPGRHDARDPELDQFMEAYCNMLAKYREELTRPIDEAMEFLKRVESQLDTIAGGGHGGSGGGAGSARLLLADGKSECVGSSEDDMDPSGRENEPPEIDPRAEDKELKFQLLKKYSGYLSSLRQEFSKKKKKGKLPKEARQKLLHWWELHYKWPYPSETEKIALAESTGLDQKQINNWFINQRKRHWKPSEDMPFVMMEGFHPQNAAALYMDGPFMADGMYRLGS

SEQ ID NO: 23375 - protein, 357 aa, Oryza sativa; identical to SEQ ID NO: 23374

SEQ ID NO: 23376 - protein, 231 aa, Physcomitrella patens
  unsure (1)..(231): unsure at all Xaa locations
RSYVGVLTKFAEDLEEPFNKFIQFTDNTSKALEEICGHYVDTTPDEDNCGFDIGPLEYGAQEGDDLDTLGDENVMYPLDIDESVIVDPMASDEDIKKALRKKYGRHIGELKAEFNRVRKKGKLPTSARTILKDWFNRHSHWPYPSEMEKQYLQRICGLNLKQINNWFINERKRHWSCEGKCMHPNAKFYGTSNGQCRGHLEXEQSNRLQXSSEETIYVKCSHAALIFEVSM

SEQ ID NO: 23377 - protein, 322 aa, Ipomoea nil
MMDETTYGFPSTSCDYADKALMSPDNNNLMMMDYPYAYNYNYNYHPGGAAADTIPFCGASTEVAAATTTCVDNEDDDVSSVMIKAKIASHPCYPKLLHAYIDCQKVGAPPEIATVLDEIRREDDELRKRGGGGAVSSCLGADPELDEFMETYYDMLVKYKSDLSKPFHEATTFLNTIETQLSNLCKDESGAVSSDEEDSGGETDIQQESITKTEERQLKNTLLRKYGSHLSSLKLEFSKKKKKGKLPKEARQTLLDWWSDHYKWPYPTEADKIALAESTGLDQKQINNWFINQRKRHWKPSESMQLAVMENLTGQFFSSDDS

SEQ ID NO: 23378 - protein, 327 aa, Arabidopsis thaliana
MDGMYNFHSAGDYSDKSVLMMSPESLMFPSDYQALLCSSAGENRVSDVFGSDELLSVAVSALSSEAASIAPEIRRNDDNVSLTVIKAKIACHPSYPRLLQAYIDCQKVGAPPEIACLLEEIQRESDVYKQEVVPSSCFGADPELDEFMETYCDILVKYKSDLARPFDEATCFLNKIEMQLRNLCTGVESARGVSEDGVISSDEELSGGDHEVAEDGRQRCEDRDLKDRLLRKFGSRISTLKLEFSKKKKKGKLPREARQALLDWWNLHYKWPYPTEGDKIALADATGLDQKQINNWFINQRKRHWKPSENMPFAMMDDSSGSFFTEE

SEQ ID NO: 23379 - protein, 324 aa, Arabidopsis thaliana
MYNFHSAGDYSDKSVLMMSPESLMFPSDYQALLCSSAGENRVSDVFGSDELLSVAVSALSSEAASIAPEIRRNDDNVSLTVIKAKIACHPSYPRLLQAYIDCQKVGAPPEIACLLEEIQRESDVYKQEVVPSSCFGADPELDEFMETYCDILVKYKSDLARPFDEATCFLNKIEMQLRNLCTGVESARGVSEDGVISSDEELSGGDHEVAEDGRQRCEDRDLKDRLLRKFGSRISTLKLEFSKKKKKGKLPREARQALLDWWNLHYKWPYPTEGDKIALADATGLDQKQINNWFINQRKRHWKPSENMPFAMMDDSSGSFFTEE

SEQ ID NO: 23380 - protein, 326 aa, Arabidopsis thaliana
MYNFHSAGDYSDKSVLMMSPESLMFPSDYQALLCSSAGENRVSDVFGSDELLSVAVSALSSEAASIAPEIRRNDDNVSLTVIKAKIACHPSYPRLLQAYIDCQKKQVGAPPEIACLLEEIQRESDVYKQEVVPSSCFGADPELDEFMETYCDILVKYKSDLARPFDEATCFLNKIEMQLRNLCTGVESARGVSEDGVISSDEELSGGDHEVAEDGRQRCEDRDLKDRLLRKFGSRISTLKLEFSKKKKKGKLPREARQALLDWWNLHYKWPYPTEGDKIALADATGLDQKQINNWFINQRKRHWKPSENMPFAMMDDSSGSFFTEE

SEQ ID NO: 23381 - protein, 344 aa, Arabidopsis thaliana
MYNFHSAGDYSDKSVLMMSPESLMFPSDYQALLCSSAGENRVSDVFGSDELLSVAVSALSSEAASIAPEIRRNDDNVSLTVIKAKIACHPSYPRLLQAYIDCQKVGAPPEIACLLEEIQRESDVYKQEVVPSSCFGADPELDEFMETYCDILVKYKSDLARPFDEATCFLNKIEMQLRNLCTGVESARGVSGGMSPHGDKTISPLLTNDNGEDGVISSDEELSGGDHEVAEDGRQRCEDRDLKDRLLRKFGSRISTLKLEFSKKKKKGKLPREARQALLDWWNLHYKWPYPTEGDKIALADATGLDQKQINNWFINQRKRHWKPSENMPFAMMDDSSGSFFTEE

SEQ ID NO: 23382 - protein, 311 aa, Arabidopsis thaliana
MDRMCGFRSTEDYSEKATLMMPSDYQSLICSTTGDNQRLFGSDELATALSSELLPRIRKAEDNFSLSVIKSKIASHPLYPRLLQTYIDCQKVGAPMEIACILEEIQRENHVYKRDVAPLSCFGADPELDEFMETYCDILVKYKTDLARPFDEATTFINKIEMQLQNLCTGPASATALSDDGAVSSDEELREDDDIAADDSQQRSNDRDLKDQLLRKFGSHISSLKLEFSKKKKKGKLPREARQALLDWWNVHNKWPYPTEGDKIALAEETGLDQKQINNWFINQRKRHWKPSENMPFDMMDDSNETFFTEE

SEQ ID NO: 23383 - protein, 310 aa, Arabidopsis thaliana
MDRMCGFRSTEDYSEKATLMMPSDYQSLICSTTGDNQRLFGSDELATALSSELLPRIRKAEDNFSLSVIKSKIASHPLYPRLLQTYIDCQKVGAPMEIACILEEIQRENHVYKRDVAPLSCFGADPELDEFMETYCDILVKYKTDLARPFDEATTFINKIEMQLQNLCTGPASATALSDDGAVSSDEELREDDDIAADDSQQRSNDRDLKDQLLRKFGSHISSLKLEFSKKKKKGKLPREARQALLDWWNVHNKWPYPTEGDKISLAEETGLDQKQINNWFINQRKRHWKPSENMPFDMMDDSNETFFTE

SEQ ID NO: 23384 - protein, 311 aa, Arabidopsis thaliana
MDRMCGFRSTEDYSEKATLMMPSDYQSLICSTTGDNQRLFGSDELATALSSELLPRIRKAEDNFSLSVIKSKIASHPLYPRLLQTYIDCQKVGAPMEIACILEEIQRENHVYKRDVAPLSCFGADPELDEFMETYCDILVKYKTDLARPFDEATTFINKIEMQLQNLCTGPASATALSADDGAVSSDEELREDDDIAADDSQQRSNDRDLKDQLLRKFGSHISSLKLEFSKKKKKGKLPREARQALLDWWNVHNKWPYPTEGDKISLAEETGLDQKQINNWFINQRKRHWKPSENMPFDMMDDSNETFFTE

SEQ ID NO: 23385 - protein, 294 aa, Brassica napus
MQEAALGMIGATVGGGGDGDAAVVAEQNRQMKGEIATHPMYDQLLAAHVACLRVATPIDQLPIIEAQLSHSHHLLRSYASTAVGFSHHDRQELDNFLAQYVMVLCSFKEQLQQHVRVHAVEAVMACREIENNLHSLTGATLGEGSGATMSEDEDDLQMDFSSDNSGVDFSGGHDMTGFGPLLPTESERSLMERVRQELKLELKQGFKSRIEDVREEIMRKRRAGKLPGDTTTVLKNWWQQHCKWPYPTEDDKAKLVEETGLQLKQINNWFINQRKRNWHNNSHSLTSLKSKRKH

SEQ ID NO: 23386 - protein, 164 aa, Oryza sativa (indica cultivar-group)
MEDLYSIHPGISRGGGGGGGGAASEASGVAGGGSSPPHPPPPATTAAAADLTELMKAQIAGHPSYPSLLSAYIECRKVGAPPEVTTLLEEIGREGRGGGGGATAGGEIGLDPELDEFMETYCRVLERYKEELTRPFDEAASFLTGIHTQLASLCGGAPPPTDNS

SEQ ID NO: 23387 - protein, 320 aa, Lycopersicon esculentum
MDDEIMYGFNSTRDDYADKALMSPENLMMQTEYNNFHNYTNSSIMFGSDPIQLSSEQTLQNNIYRGNCCGGSGSGGDNNNNNDEDGSNIIKAKILSHPYYPKLLNAYIDCQKVGAPASIVNLLEEIRQQNDFRKPNATCLCIGADPELDEFMETYCDILLKYKSDLSRPFDEATTFLNNIEMQLGNLCKDDDEEEEEELSCGDASSSMRRSEDNELKDRLLRKFGSHLSSLKLEFSKKKKKGKLPKEAREMLLAWWYDHFRWPYSTEADKNSLAESTGLDPKQINNWFINQRKRHWKPSENMQLAVMDNLSAQFFSSDVD

SEQ ID NO: 23388 - protein, 319 aa, Nicotiana tabacum
MDDEIYGFHSTSEYADKALMSPENLMMQTEYNMTYHNYNTLSTPPMMFGSDDVQLSSEAANSENNNIHHQIRGSCSRRDDTEDASNIIKAKVVSHPFYPKFVRAYIDCQKVGAPPEIATVLEEIRQQNDFRKPNATSICIGADPELDEFMETYCDILVKYKSDLSRPFDEATTFLSKIELQLSNLCKDDGGVSSDEELSCGEVEGQDASQRSEDNELKDRLLRKFGSHLSTLKLEFSKKKKKGKLPKEARQMLLAWWNDHYRWPYPTEADKNSLAESTGLDPKQINNWFINQRKRHWKPSENMQLAVMDNLSGQFFSDD

SEQ ID NO: 23389 - protein, 322 aa, Nicotiana tabacum
MEKMYEFVSSSSDVYSVEDNLQPPYFGSPPAFCDGLAPMGFGSGNMSWACPETSAANLVVDKSGTSSSNLQLEDHPETDIRAKISSHPLYPKLLRTYIDCHKVGAPSDEIVDMLDNINIVHENDLSRRSNRLSDDSELDAFMETYCDVLAKFKSDLERPFNEATTFLNDIETQLTNLCAAPATTISNISDEGAAGTEEEEEVADTSGGGGNTNDMCRSENEIKDKLMRKYSGYISSLKQEFSKKNKKGKLPREARQILLNWWTTHYKWPYPTEGEKICLAESTGLDPKQINNWFINQRKRHWKPSENMQYAVMESIYGHFSE

SEQ ID NO: 23390 - protein, 296 aa, Zea mays
  unsure (1)..(296): unsure at all Xaa locations
MEDLYSIHPGISRVVGGAASEASVXAGAGAGGPSPSDLTELMKAQIASHPRYPSLLSAYIECRKVGAHPHVTSLLEEVSRERRPDAGAGEIGVDPELDEFMDAYCRVLVRYKEELTRPFDEAASFLSSIQAQLSDLCSGGSSPAATATHSDDMMGSSEDEQCSGDTDVPDMGQEHSSHLGDHELKEMLLKKYSGCLSRLRSEFLKKRKKGKLPKDARTVLLEWWNTHYRWPYPTEEDKVRLAAMTGLDPKQINNWFINQRKRHWKPSEDMRFALMEGVAGGSSGTTLYFDTGTIGP

SEQ ID NO: 23391 - protein, 295 aa, Zea mays
MEDLYSIHPGISRVVGGAASEASVAGAGAGGPSPSDLTELMKAQIASHPRYPSLLSAYIECRKVGAHPHVTSLLEEVSRERRPDAGAGEIGVDPELDEFMDAYCRVLVRYKEELTRPFDEAASFLSSIQAQLSDLCSGGSSPAATATHSDDMMGSSEDEQCSGDTDVPDMGQEHSSHLGDHELKEMLLKKYSGCLSRLRSEFLKKRKKGKLPKDARTVLLEWWNTHYRWPYPTEEDKVRLAAMTGLDPKQINNWFINQRKRHWKPSEDMRFALMEGVAGGSSGTTLYFDTGTIGP

SEQ ID NO: 23392 - protein, 297 aa, Zea mays
MEDLYSIHPGISRVVGGAASEASVAGAGAGGPSPSDLTELMKAQIASHPRYPSLLSAYIECRKVGAHPHVTSLLEEVSRERRPGPGAGAGEIGVDPELDEFMDAYCRVLVRYKEELTRPFDEAASFLSSIQAQLSDLCSGGSSPAATATHSDDMMGSSEDEQCSGDTDVPDMGQEHSSHLGDHELKEMLLKKYSGCLSRLRSEFLKKRKKGKLPKDARTVLLEWWNTHYRWPYPTEEDKVRLAAMTGLDPKQINNWFINQRKRHWKPSEDMRFALMEGVAGGSSGTTLYFDTGTIGP

SEQ ID NO: 23393 - protein, 300 aa, Zea mays
  unsure (1)..(300): unsure at all Xaa locations
MEDLYSIHPGISRHGAAATSEASGVAGGPGSPPPPPPPAADLTELVKAQIAGHPRYPSLLSAYIDCRKVGAPSEVATLLEEIGRERXXAAASAGGEVVGMDPELDEFMETYCRLLERYKEELSRPFDEAASFLSSVRTQLSSLCGGAXXSLSDEMVESSEDEPCSGDTDATTDPGQEHSSRLADRELKEMLLKKYSGCLSRLRSEFLKKRKKGKLPKDARSALMDWWNTHYRWPYPTEEDKVRLAAMTGLDPKQINNWFINQRKRHWKPSEDMRFALMEGGVSGSSSGTTLYFDTGTIGP

SEQ ID NO: 23394 - protein, 300 aa, Zea mays
  unsure (1)..(300): unsure at all Xaa locations
MEDLYSIHPGISRHGAAATSEASGVAGGPGSPPPPPPPAADLTELVKAQIAGHPRYPSLLSAYIDCRKVGAPSEVATLLEEIGRERXXAAASAGGEVVGMDPELDEFMETYCRLLERYKEELSRPLDEAASFLSNVRTQLSSLCGGAXXSLSDEMVESSEDEPCSGDTDATTDPGQEHSSRLADRELKEMLLKKYSGCLSRLRSEFLKKRKKGKLPKDARSALMDWWNTHYRWPYPTEEDKVRLAAMTGLDPKQINNWFINQRKRHWKPSEDMRFALMEGGVAGSSSGTTLYFDTGTIGP

SEQ ID NO: 23395 - protein, 309 aa, Zea mays
  unsure (1)..(309): unsure at all Xaa locations
MEDLYSIHPGISRAGGAATAASEVSGVAGGPGSPPPPPSQPPPPPPADLTELVKAQIAGHPRYPSLLSAYIECRKVGAPPEVATLLEEIGRERXXAAASAGGEVGLDPELDEFMEAYCRVLERYKEELSRPFDEAASFLSSVRTQLSSLCXXPPPRSQLYEMVGSSEEDEACSGGDTEATEPGQQEHSSRLADHELKEMLLKKYSGCLSRLRSEFLKKRKKGKLPKDARSALMDWWNTHYRWPYPTEEDKVRLAAATGLDPKQINNWFINQRKRHWKPSEDMRFALMEGVTGGASSGTTLYFDTGTIGP

SEQ ID NO: 23396 - protein, 302 aa, Zea mays
  unsure (1)..(302): unsure at all Xaa locations
MEDLYSIHPGISRHXGGGXXSEASGVAGGPGSPPPPPPPAADLTELVKAQIAGHPRYPSLLSAYIDCRKVGAPSEVATLLEEIGRERXXAAASAGGEVVGMDPELDEFMETYCRLLERYKEELSRPLDEAASFLSNVRTQLSSLCGGAASLSDENEMVESSENEPCSGDTDATTDPGQEHSSRLADRELKEMLLKKYSGCLSRLRSEFLKKRKKGKLPKDARSALMDWWNTHYRWPYPTEEDKVRLAAMTGLDPKQINNWFINQRKRHWKPSEDMRFALMEGGVAGSSSGTTLYFDTGTIGP

SEQ ID NO: 23397 - protein, 395 aa, Neurospora crassa
MATSFYHHPPHHRPQTMHGLNVSSSHNDPRSLPSPGSALPPIRSIIPDFDKLDMDYGRRQSQAQKDTIDGGNSQGYTTDRLPTTGSSPSINVFSQHSHGQQDSGARTYLDGPLPRLPPSNAFAQHNGYHQNSEPRRGYPQYGQHQPIYRQDSYPPHGYPQDSYYPPLEHRHGPFPQPGSQQNLYEQRARSERLHYAHPWGGHSDSAVSPRGGDGGKNKRRGNLPKEVTEKLYAWLYGHLNHPYPTEDEKQKMMRETNMQMNQISNWFINARRRKVPLLIEQAKAETEAAKHYRPNSSPIARRTRPVSVSHTRHYSRSGPGRGVPSRRSVSVEPSINHLLNCPESDADVRPPQYATPMSDRGVLDYSSRESSESYEMDSRYQSYGHGHGHGHHASI

SEQ ID NO: 23398 - protein, 286 aa, Dendrobium grex Madame Thong-IN
MDEMYSIPPDSTFAAADDLHGLIAASGYGAAAAAAAAEEEMKARIASHPRYPHLLEAYIDCQKVGAPPDIASLLEEIRRENAGGERLASSSVILGSDPELDEFMEMYCDVLVKYRRDLERPFDEATAFLNTMEVQLSDLCKPTCRAALGPYVSDEAVGSSDEELSGGEGEAPESHLKGEERDLKEKLLRKYSGYLSSLKQEFSKKKKKGKLPKEARQILFEWWTAHYKWPYPTEADKIALAEATGLDQKQINNWFINQRKRHWKPAENMHFSVMDNSSTSSLFADD

SEQ ID NO: 23399 - protein, 382 aa, Homo sapiens
PDERKVPLASQYDELPHYPGIVDGPAALASFPETVPAVPGPYGPHRPPQPLPPGLDSDGLKREKDEIYGHPLFPLLALVFEKCELATCSPRDGAGAGLGTPPGGDVCSSDSFNEDIAAFAKQVRSERPLFSSNPELDNLMIQAIQVLRFHLLELEKVHDLCDNFCHRYITCLKGKMPIDLVIEDRDGGCREDFEDYPASCPSLPDQNNMWIRDHEDSGSVHLGTPGPSSGGLASQSGDNSSDQGDGLDTSVASPSSGGEDEDLDQERRRNKKRGIFPKVATNIMRAWLFQHLSHPYPSEEQKKQLAQDTGLTILQVNNWFINARRRIVQPMIDQSNRTGQGAAFSPEGQPIGGYTETQPHVAVRPPGSVGMSLNLEGEWHYL

SEQ ID NO: 23400 - protein, 204 aa, Homo sapiens
MWIRDHEDSGSVHLGTPGPSSGGLASQSGDNSSDQGDGLDTSVASPSSGGEDEDLDQERRRNKKRGIFPKVATNIMRAWLFQHLSHPYPSEEQKKQLAQDTGLTILQVNNWFINARRRIVQPMIDQSNRTGQGAAFSPEGQPIGGYTETQPHVAVRPPDPASGCDPQPHTCLWFPPGPPASGPHLQRPLCSMPTSLGPCWDMGA

SEQ ID NO: 23401 - protein, 435 aa, Homo sapiens
MATQTLSIDSYQDGQQMQVVTELKTEQDPNCSEPDAEGVSPPPVESQTPMDVDKQAIYRHPLFPLLALLFEKCEQSTQGSEGTTSASFDVDIENFVRKQEKEGKPFFCEDPETDNLMVKAIQVLRIHLLELEKVNELCKDFCSRYIACLKTKMNSETLLSGEPGSPYSPVQSQQIQSAITGTISPQGIVVPASALQQGNVAMATVAGGTVYQPVTVVTPQGQVVTQTLSPGTIRIQNSQLQLQLNQDLSILHQDDGSSKNKRGVLPKHATNVMRSWLFQHIGHPYPTEDEKKQIAAQTNLTLLQVNNWFINARRRILQPMLDSSCSETPKTKKKTAQNRPVQRFWPDSIASGVAQPPPSELTMSEGAVVTITTPVNMNVDSLQSLSSDGATLAVQQVMMAGQSEDESVDSTEEDAGALAPAHISGLVLENSDSLQ

SEQ ID NO: 23402 - protein, 436 aa, Homo sapiens
MMATQTLSIDSYQDGQQMQVVTELKTEQDPNCSEPDAEGVSPPPVESQTPMDVDKQAIYRHPLFPLLALLFEKCEQSTQGSEGTTSASFDVDIENFVRKQEKEGKPFFCEDPETDNLMVKAIQVLRIHLLELEKVNELCKDFCSRYIACLKTKMNSETLLSGEPGSPYSPVQSQQIQSAITGTISPQGIVVPASALQQGNVAMATVAGGTVYQPVTVVTPQGQVVTQTLSPGTIRIQNSQLQLQLNQDLSILHQDDGSSKNKRGVLPKHATNVMRSWLFQHIGHPYPTEDEKKQIAAQTNLTLLQVNNWFINARRRILQPMLDSSCSETPKTKKKTAQNRPVQRFWPDSIASGVAQPPPSELTMSEGAVVTITTPVNMNVDSLQSLSSDGATLAVQQVMMAGQSEDESVDSTEEDAGALAPAHISGLVLENSDSLQ

SEQ ID NO: 23403 - protein, 436 aa, Homo sapiens [sequence omitted]

SEQ ID NO: 23404 - protein, 435 aa, Homo sapiens
MATQTLSIDSYQDGQQMQVVTELKTEQDPNCSEPDAEGVSPPPVESQTPMDVDKQAIYRHPLFPLLALLFEKCEQSTQGSEGTTSASFDVDIENFVRKQEKEGKPFFCEDPETDNLMVKAIQVLRIHLLELEKVNELCKDFCSRYIACLKTKMNSETLLSGEPGSPYSPVQSQQIQSAITGTISPQGIVVPASALQQGNVAMATVAGGTVYQPVTVVTPQGQVVTQTLSPGTIRIQNSQLQLQLNQDLSILHQDDGSSKNKRGVLPKHATNVMRSWLFQHIGHPYPTEDEKKQIAAQTNLTLLQVNNWFINARRRILQPMLDSSCSETPKTKKKTAQNRPVQRFWADSIASGVAQPPPSELTMSEGAVVTITTPVNMNVDSLQSLSSDGATLAVQQVMMAGQSEDESVDSTEEDAGALAPAHISGLVLENSDSLQ

SEQ ID NO: 23405 - protein, 405 aa, Homo sapiens
MMATQTLSIDSYQDGQQMQVVTELKTEQDPNCSEPDAEGVSPPPVESQTPMDVDKQAIYRHPLFPLLALLFEKCEQSTQGSEGTTSASFDVDIENFVRKQEKEGKPFFCEDPETDNLMVKAIQVLRIHLLELEKVNELCKDFCSRYIACLKTKMNSETLLSGEPGSPYSPVQSQQIQSAITGTISPQGIVVPASALQQGNVAMATVAGGTVYQPVTVVTPQGQVVTQTLSPGTIRIQNSQLQLQLNQDLSILHQDDGSSKNKRGVLPKHATNVMRSWLFQHIGHPYPTEDEKKQIAAQTNLTLLQVNNWFINARRRILQPMLDSSCSETPKTKKKTAQNRPVQRFWPDSIASGVAQPPPSELTMSEGTGGRPRPDMVDHGVGIMNKRPGSGLLAVSHRARPRMTS

SEQ ID NO: 23406 - protein, 358 aa, Ipomoea nil
MDELYGIHSVLAPSNAPSNNNNNVFSLGVDDIHHHHNHHHHQSSMMNGGIVISGDEGQLQGQHHHHHHLLVTSSNDNYYNSDENSKGGGGGVEMMSDVVKAQIASHPLYPNLVSAYIQCRKVAAPPEMAALLEELSKVTQPITTAEIGADPELDEFMESYCEVLYKYKEELSKPFDEAKTFLSSIESQLSNLCKDTFPTTSFNSYHSGDEAGGTSEEDLSCGEVEVAESQEHLNNNSEGDQQIKEMLMRKYSGYLSSLRKEFLKKRKKGKLPKDARVALLDWWNSHYRWPYTTEEEKNKLSEATGLDQKQINNWFINQRKRHWRPSEDMRFALMEGVSGDVAGSMFFDAGGGTGNLGI

SEQ ID NO: 23407 - protein, 301 aa, Oryza sativa (japonica cultivar-group)
MEDLYSIHPGISRVGGAASEASGVGVVVGGGGGSSSSDLTELMKAQIAGHPRYPTLLSAYIECRKVGAPPEVASLLKEIGRERRAGGGGGGAGQIGVDPELDEFMEAYCRVLVRYKEELSRPFDEAASFLSSIQTQLSNLCSGATSPPATTATHSDEMVGSSDEDQCSGETDMLDIGQEQSSRLADHELKEMLLKKYSGCLSRLRSEFLKKRKKGKLPKDARSALLEWWNTHYRWPYPTEEDKLRLAARTGLDPKQINNWFINQRKRHWKPSDGMRFALMEGVAGGSSGTTLYFDTGTIGP

SEQ ID NO: 23408 - protein, 335 aa, Lycopersicon esculentum
MMDELSKLHSAIVCSHSRRQQEVEVEAEAGPTIINNTTTSFAAVHHHYCQLEAAVAADHNHHQNNTKSTTNMSDLIKAQIANHPLYPNLLSAYLQCRKVGAPQEMTSILDEISKENNLISSSRHSSEIGADPELDEFMESYCAVLVKYKEEFSKPFDEATSFLSNIESQLSSLCKDNLITSTSFNNYISDEAGGSSDEDLGCEEMEAADSQESPANCEGDNELKEMLMRKYSGYLSSLRKEFLKKRKKGKLPKEARIVLLDWWKNHYRWPYPTEEEKNRLSEMTGLDQKQINNWFINQRKRHWRPSEDMKFALMEGVSAGSMYFDGSGGTGNIGT

SEQ ID NO: 23409 - protein, 327 aa, Nicotiana tabacum
MMDELSKLHSAIACSSNNNHVVGVLEHITGQQQEGPINNSSVDNNLEKASLEMSDLIKAQIANHPLYPNLLSAYLQCRKVGAPQEMASILEEISKENHLISSGHNTEIGTDPELDDFMESYCAVLLKYKEELSKPFDEATTFLNNIESQLSSLCKENLTTTTTTTTSFNSNNNYLSDEAGGTSDEDLCCGEMEAADSTQESPANREGDNELKETLMRKYSGYLSSLRKEFLKKRKKGKLPKDARTALLEWWNTHYRWPYPTEEEKNRLSEITGLDPKQINNWFINQRKRHWRPSEDMKYALMEGVSSGSIAGSMYFDGAGGTGSIGT

SEQ ID NO: 23410 - protein, 311 aa, Oryza sativa
MEDLYSIHPGISRGGGGGGGGAASEASGVAGGGSSPPHPPPPATTAAAADLTELMKAQIAGHPSYPSLLSAYIECRKVGAPPEVTTLLEEIGREGRGGGGGATAGGEIGLDPELDEFMETYCRVLERYKEELTRPFDEAASFLTGIHTQLASLCGGAPPPTDNSDEMVGSSEDEPCSGDADAADFGQEHSSRLADHELKEMLLKKYSGCLSRLRSEFLKKRKKGKLPKDARSALMDWWNTHYRWPYPTEEDKVRLAAMTGLDPKQINNWFINQRKRHWKPSEDMRFALMEGVTGGSSSGTTLYFDTGTIGP

SEQ ID NO: 23411 - protein, 311 aa, Oryza sativa; identical to SEQ ID NO: 23410

SEQ ID NO: 23412 - protein, 301 aa, Oryza sativa; identical to SEQ ID NO: 23407

SEQ ID NO: 23413 - protein, 301 aa, Oryza sativa
MEDLYSIHPGISRVGGAASEASGVGVVVGGGGGSSSSDLTELMKAQIAGHPRYPTLLSAYIECRKVGAPPEVASLLKEIGRERRAGGGGGGAGQIGVDPELDEFMEAYCRVLVRYKEELSRPFDEAASFLSSIQTQLSNLCSGATSPPATTATHSDEMVGSSDEDQCSGETDMLDIGQEQSSRLADHELKEMLLKKYSGCLSRLRSEFLKKRKKGKLPKDARSALLEWWNTHYRWPYPTEEDKLRLAARTGLDPKQINNWFINQRKRHWKPSDGMRFAFMEGVAGGSSGTTLYFDTGTIGP

SEQ ID NO: 23414 - protein, 140 aa, Triticum aestivum
  unsure (1)..(140): unsure at all Xaa locations
XDASGRENEPPEIDPRAEDKELKYQLLKKYSGYLSSLRQEFSKKKKKGKLPKEARQKLLHWWELHYKWPYPSETEKIALAESTGLDQKQINNWFINQRKRHWKPSEDMPFVMMEGFHPQNAAALYMDGQFMADGMYSLGS

SEQ ID NO: 23415 - protein, 142 aa, Triticum aestivum
  unsure (1)..(142): unsure at all Xaa locations
XCVEEIDPSAEDKELKHQLLRKYGGYVGSLRQEFCKRRKKGKLPKEARQKLLHWWELHSKWPYPSETEKIALAESTGLDQKQINNWFINQRKRHWKPAPEDMPFSVMDGGVGVGVXLPPRPAAALYMDRAPFMVDGMYRLGS

SEQ ID NO: 23416 - protein, 263 aa, Zea mays
  unsure (1)..(263): unsure at all Xaa locations
RALYNEIRSMKVRDVPAXPESRAXPVTTSRRAPTRPSTATSRSTSTRARRTLSTTSASEVVGMDPELDEFMETYCRLLERYKEELSRPFDEAASFLSSVRTQLSSLCGGAXXSLSDEMVESSEDEPCSGDTDATTDPGQEHSSRLADRELKEMLLKKYSGCLSRLRSEFLKKRKKGKLPKDARSALMDWWNTHYRWPYPTEEDKVRLAAATGLDPKQINNWFINQRKRHWKPSEDMRFALMEGVTGGASSGTTLYFDTGTIGP

SEQ ID NO: 23417 - protein, 385 aa, Arabidopsis thaliana
MFIEKLKKKGTNASLRNRDEETADKQIQFNDQSFGGNDYAPKVRKPYTITKERERWTDEEHKKFVEALKLYGRAWRRIEEHVGSKTAVQIRSHAQKFFSKVAREATGGDGSSVEPIVIPPPRPKRKPAHPYPRKFGNEADQTSRSVSPSERDTQSPTSVLSTVGSEALCSLDSSSPNRSLSPVSSASPPAALTTTANAPEELETLKLELFPSERLLNRESSIKEPTKQSLKLFGKTVLVSDSGMSSSLTTSTYCKSPIQPLPRKLSSSKTLPIIRNSQEELLSCWIQVPLKQEDVENRCLDSGKAVQNEGSSTGSNTGSVDDTGHTEKTTEPETMLCQWEFKPSERSAFSELRRTNSESNSRGFGPYKKRKMVTEEEEHEIHLHL

SEQ ID NO: 23418 - protein, 287 aa, Arabidopsis thaliana
MAMQERCESLCSDELISSSDAFYLKTRKPYTITKQREKWTEAEHEKFVEALKLYGRAWRRIEEHVGTKTAVQIRSHAQKFFTKVARDFGVSSESIEIPPPRPKRKPMHPYPRKLVIPDAKEMVYAELTGSKLIQDEDNRSPTSVLSAHGSDGLGSIGSNSPNSSSAELSSHTEESLSLEAETKQSLKLFGKTFVVGDYNSSMSCDDSEDGKKKLYSETQSLQCSSSTSENAETEVVVSEFKRSERSAFSQLKSSVTEMNNMRGFMPYKKRVKVEENIDNVKLSYPLW

SEQ ID NO: 23419 - protein, 723 aa, Phaseolus vulgaris
MDAYSSGEEVVVKTRKPYTITKQRERWTEEEHNRFLEALKLHGRAWQRIEEHIGTKTAVQIRSHAQKFFTKLEKEALVKGVPIGQALDIDIPPPRPKRKPSNPYPRKTTIGTATLHSGAKDGNLVESSHNNQALDLEKEPLPEKYDLDEGLTTVKENKDENCSKVFKVIQEVPCSSISSANRSSISMSVPLGNSCVLKEITSSVKEVITRDENTESFLTVELGNRNLEINDGKQANGTSKNSTLENSDALQTKLVQNEKTDGLDSALTIDGMQGNQNYPRHVTVHVVDGKLGTSTQNPSQDMLFRDSMFQPIGGDNGQPNLFTNSAPTNTSESQNNTARSSVHQSFLPYPPFTQHNQDDYQSFLHMSSTFSNLVVSTLLQNPAAHVAASFAATFWPYANPETSADSPRCSQGGFTSRQIGSPPSVAAIAAATVAAATAWWAAHGLLPLCLPLHAAFACPPASVTAVPSMNPPVQDQKHPEYSEAPQAQHSDSKSLAVISSDSETGNAKLNTSPKATDHVTNETISEHLDSDKTKGRKQVDRSSCGSNTASSSDVETDALGKDEKGKEEPETPDANNLAIEFSNRRRSIYNLTDSWKEVSSEGRLAFQALFSREVLPQSFSPPHALKNKDQMDITNDYKQNIADRNEDLDSKKCSSNALHKIPSFVENNVGLLTIGLGQGKLKTRRTGFKPYKRCSVEARENRVGANCEEKGCKRIRLEGDTST

SEQ ID NO: 23420 - protein, 255 aa, Oryza sativa (japonica cultivar-group)
MCASARFDLGTGVVLMDRNTNNNSNSSSSSEMPGKKARKPYTITKPRERWSEEEHERFLDALIMYGRDWKKIEEHVGTKTTIQIRSHAQKYFLKVQKMGLAAGLPPQYPRRRLVMQQQQQQSSPAVSSSVAATAILHGQPQCLPPHHNVAVQSSIGESSFMGAASFSNTSMDWTGTTSEMATASIVQDETIELPLSPDDLQFAQVYRFIGDIFDPDSPCPVETHLQKLKSMDDIIVKTRRLLSTYDPNRGLSGHL

SEQ ID NO: 23421 - protein, 282 aa, Oryza sativa
  unsure (1)..(282): unsure at all Xaa locations
LRNARFFASSFPSPPHLPPSRRPHQQHRGENSQRLRGLGGADFLALVWRSCGVWFGLGGVRFFQNGDGLFAGKRHGNRRKRCRRSRRRREHRGSSQELNYGDMDLSGEEHVPKARKPYTITKQREKWTDEEHRLFLEALQLHGRAWRRIQEHIGTKTAVQIRSHAQKFFSEVVRESSGSNTGXGRRVRPIQIPPPRPKRKPAHPYPRKVDGAAKKHVPALSLSEQEEGSPTSVLTAVGTEALGGGFSNNSSGSGSLAPSAAAEAAGGEEAVADGELTRLCLX

SEQ ID NO: 23422 - protein, 369 aa, Triticum aestivum
  unsure (1)..(369): unsure at all Xaa locations
REKQQQRLGAADFASVLRRPPLSPIWLRRCSDFEGSRERYGSFSGNQAGSAEFRQRYADDVPKARKPYMITKQREKWTEEEHKLFLEAMQLHGRAWRRIQEHIGTKTAVQIRSHAQKFFSKVTRDSSGDSGGSSSAIQIPPPRPKRKSVHPYPKHAHAALLRVDKPQLSMCEQGNGSPTSVVTDTSTIDVEERCPTPSTGTAEVAVQAPPTNDAKKSKGSSXHFRRSWFVTTRPIPVLKLFGKTVVVNESRIXXASPGTCDLQTAADVELDTSSETLTSAPEANTWSPWLANSQQFMYYVPQGANHALERSATTTKWCMLXGLRERVSPAFVQQRGFMPYKRCAAETKAMQPQAXXREEADREMTRLCL

SEQ ID NO: 23423 - protein, 398 aa, Zea mays
  unsure (1)..(398): unsure at all Xaa locations
MESMAQERDALDSPALSIDKRLRSDAVESPLVDDATQPKEGADGYPVKVRKPYTITKQREKWTEEEHGKFLEALKLYGRSWRQIQEHIGTKTAVQIRSHAQKFFSKVVREPGASNSIEIPPPRPKRKPLHPYPRKCADSTNAPVSSPSGSDQENGSPVSVLSAMQSDAFGSSISNPSTGGTSPASSDDGNNVPEIVNGEENLLTQQIEAHQESKQDNSDGELSEEDSSRVQETSLKLFGKTVIIPDPKKVCSSDGGAGDXYTRSDANILGWRRGGSXTLPITDGFFRSILSLLIFRPAIQEGLAQGCLTKXAIESDADNSPSVETNSDRTGNVHVQTTTPTIHNNAELKPSANSAFVRVKPSSSESLVRGFVPYKRCKVEXNPTQRHTCLLLILLEID

SEQ ID NO: 23424 - protein, 376 aa, Zea mays
  unsure (1)..(376): unsure at all Xaa locations
WLVFSRGPIKGLLWTWTTSAMETSQSTLSSGDMDLPGGARAPKARKPYTISKQREKWTEDEHRLFLEALRQHGRAWRRIQEHVGSKTAVQIRSHAQKFFSKVIRESSGGDSNGTPQIQIPPPRPKRRPTHPYPRKLGNSVGKDASAAIKQLRKPQLQAQSLSEQENCSPKSVLTTAQMCSEAPVDHRLPPFTWRTNASHQTRQSGSQVCKWHSPRIPNAACEIPEAEGPVLRLFGKRVVVSNLDQQPSSNTGSLQHAADMELDDASAETPTSGTGKLSSHAAEEAETWCPXXLVALDAQTVTSNKQRSRPWTESIETSSSVPGTAQNSDPAESTKVNRGEDKVAXTRSRFKEMRGRNSXACRRGFVPYKKCTARSK

SEQ ID NO: 23425 - protein, 472 aa, Streptomyces coelicolor A3(2)
MASTSQAPSPGAGTAHPDHLGHVIFIAAAAAMGGFLFGYDSSVINGAVEAIRDRYDVGSAVLAQVIAVALIGCAIGAATAGRIADRIGRIRCMQIAAVLFTVSAVGSALPFALWDLAMWRIIGGFAIGMASVIGPAYIAEVSPPAYRGRLGSFQQAAIVIGIAVSQLVNWGLLNAAGGDQRGELMGLEAWQVMLGVMVIPAVLYGLLSFAIPESPRFLISVGKRERAKKILEEVEGKDVDFDARVTEIEHAMHREEKSSFKDLLGGSFFFKPIVWIGIGLSVFQQFVGINVAFYYSSTLWQSVGVDPADSFFYSFTTSIINIVGTVIAMIFVDRVGRKPLALIGSVGMVIGLALEAWAFSFDLVDGKLPATQGWVALIAAHVFVLFFALSWGVVVWVFLGEMFPNRIRAAALGVAASAQWIANWAITASFPSLADWNLSGTYVIYTIFAALSIPFVLKFVKETKGKALEEMG

SEQ ID NO: 23426 - protein, 81 aa, Viscum album subsp. album
GFAWSWGPLGWLVPSEIFPLEIRSAAQSINVSVNMLFTFIVAQIFLTMLCHLKFGLFLFFAFFVVLMSIFVYYFLPETKGI

SEQ ID NO: 23427 - protein, 81 aa, Viscum album subsp. album
GFAWSWGPLGWLVPSEIFPLEIRSAAQSVNVSVNMFFTFLIAEVFLTLLCHMKFGLFLFFGVFVLIMSAFVFFFLPETKGI

SEQ ID NO: 23428 - protein, 83 aa, Viscum album subsp. album
LGFAWSWGPLGWTVPSEIFPLEIRSVGQSVTVAVNLLFTFAVAQSFLSLLCVLKWGIFLFFAAWIAAMTVFVYVFLPETKGIP

SEQ ID NO: 23429 - protein, 82 aa, Viscum album subsp. album
GFAWSWGPLGWLIPSEIFPLETRSAGFFFAVSMNMFCTFLVAQAFLTMLCLMRSGIFFFFAAWIVVMGIFAIFFLPETKGIP

SEQ ID NO: 23430 - protein, 82 aa, Viscum album subsp. album
GFAWSWGPLGWLIPSETFPLETRTAGFSFAVSSNMLFTFVIAQAFLSMLCSLRAGIFFFFAAWIVVMGLFALFLLPETKGIP

SEQ ID NO: 23431 - protein, 74 aa, Viscum album subsp. album
LGWLVPSEIFPLEIRSAAQSVTVSVNMLFTFIIAQVFLTMLCHLKFGIFLFFAFFVVLMSIFIYYFLPETKGIP

SEQ ID NO: 23432 - protein, 459 aa, Sulfolobus tokodaii
MVKRLDNAEVIRLHILATIIGALGGFLFGYDTGIIGSVLVYVTPLFHLTPPEVAILTSGTSLLAGIGALAAGPITDKYGRKSLLVTDGIMYAVFALLSAIAINSFLLILWRSLVGFAIGADTAIATAYISEFSPKRWRGRLAITQQLMIFSGITASFWAGYLLSFSANWRLMLGLGVIPAVILVALRAFLPESPRWLLLNGMEEKAKNILRKFGVNIAENEHIAAPSKELSFKEMFNNKAIRTAIILVGLWLAFQQITGINVILYYGPTIYKYLGLTGPRAILNTAISESLGAIEYAISFYLIDKWGRRKLGIFGYAGLVGSLAIMLIGLRAFTSGIVFAGVALVFTAMTLFLLFFHVGVGGVGWVLQGETIPTEVRGRGAGLLAAIDWFANFVIIFIFPYWKAAFGVYSFFALELVLSILAIAIVYLFMPETKGVSLEDMLKVFERGLSVQRQKQYAK

SEQ ID NO: 23433 - protein, 476 aa, Sulfolobus tokodaii
MSSYEDLLKVLDSRKVTRLYWIITILAAIGGFLFGYDTAVIGTAAEFAPYHYSGFLLGYEIASASLGAAIGAIIAYFYTDRYGRKSLLILDAGIYTAAAVLSALTINGIMLLVMRTIIGIAIGADSAVATAYITEYAPKDKRGSLAIMQQWMITIGILGSYLVGSAILYFLPSLAYVFDWRLILGLAAVPALIGLIFRFMMPESPRWLIYTGQFDKLKRELAKFGISVSDDVLERTRTEIQSEMSIKLDTAAKKALLLVGLWLVFQQITGINVPFYYGPILLSKLHIFSSTTNPVYSAIDGVLESTILAVINVAATYIAFRYIDKIGRRTLGISAYIGMAIFDLIGGISTLFGFDIGLLISFAGFIIFFAYGVGGTGWLIQAEYFDTRIRGRMAAIGALIDWLANFALIEVFPVMLSTVGLGGSMFIFFILDLVALVFVYFFIPETKGMSLEDVVKMFSSVPISKIKNGREIVLSK

SEQ ID NO: 23434 - protein, 468 aa, Synechocystis sp. PCC 6803
MNPSSSPSQSTANVKFVLLISGVAALGGFLFGFDTAVINGAVAALQKHFQTDSLLTGLSVSLALLGSALGAFGAGPIADRHGRIKTMILAAVLFTLSSIGSGLPFTIWDFIFWRVLGGIGVGAASVIAPAYIAEVSPAHLRGRLGSLQQLAIVSGIFIALLSNWFIALMAGGSAQNPWLFGAAAWRWMFWTELIPALLYGVCAFLIPESPRYLVAQGQGEKAAAILWKVEGGDVPSRIEEIQATVSLDHKPRFSDLLSRRGGLLPIVWIGMGLSALQQFVGINVIFYYSSVLWRSVGFTEEKSLLITVITGFINILTTIVAIAFVDKFGRKPLLLMGSIGMTITLGILSVVFGGATVVNGQPTLTGAAGIIALVTANLYVFSFGFSWGPIVWVLLGEMFNNKIRAAALSVAAGVQWIANFIISTTFPPLLDTVGLGPAYGLYATSAAISIFFIWFFVKETKGKTLEQM

SEQ ID NO: 23435 - protein, 468 aa, Synechocystis sp. PCC 6803
MNPSSSPSQSTANVKFVLLISGVAALGGFLFGFDTAVINGAVAALQKHFQTDSLLTGLSVSLALLGSALGAFGAGPIADRHGRIKTMILAAVLFTLSSIGSGLPFTIWDFIFWRVLGGIGVGAASVIAPAYIAEVSPAHLRGRLGSLQQLAIVSGIFIALLSNWFIALMAGGSAQNPWLFGAAAWRWMFWTELIPALLYGVCAFLIPESPRYLVAQGQGEKAAAILWKVEGGDVPSRIEEIQATVSLDHKPRFSDLLSRRGGLLPIVWIGMGLSALQQFVGINVIFYYSSVLWRSVGFTEEKSLLITVITGFINILTTLVAIAFVDKFGRKPLLLMGSIGMTITLGILSVVFGGATVVNGQPTLTGAAGIIALVTANLYVFSFGFSWGPIVWVLLGEMFNNKIRAAALSVAAGVQWIANFIISTTFPPLLDTVGLGPAYGLYATSAAISIFFIWFFVKETKGKTLEQM

SEQ ID NO: 23436 - protein, 433 aa, Lactococcus lactis subsp. lactis
MRKLSPTFIYFFGALGGLLFGYDTGVISGALLFIEKESWQVSSWAWMEGWITAAVLMGAVIGAVVIGPMSDRFGRKRLLLLSAVIFFVGALGSGLSNSAELLIISRVILGMAVGSASALVPTYLSELSPAKIRGGVSTMFQLMIMTGILLAYISNYALKGVSGNWHWMLGLATVPAALLFIGGLFLPESPRFLVRHDNEAGAREILGMINDDPNSIEAEISDIQLMAKEEKQGGLQELFGQMSRPVLIMAIGLAIFQQVMGCNTVLYFAPSIFVAVGFGASAALLAHIGIGIFNVIVTYIAMRVMDKVNRRWMLNFGAWGMGISLVLMSVGMILAENAHIGFGKYLAVIALTVYIAFFSATWGPVMWVMIGESFPLKIRGLGNSFGAAVNWAANWVVSLTFLPLLSFFGTGKIFLIYAACCFLSIWFTSKKSY

SEQ ID NO: 23437 - protein, 470 aa, Lactobacillus casei
MYQSKTHNHRFTGHLASAKTRLRLVALISTMGGLLFGYDTGVINGALPFISSELKLAPGSQGWVTSSLTLGAAFGAILVGRLSDRYGRRRLITMLAGLFFLATVASSLSPSAGWLIGARLILGLAVGGVSVLVPSFLAEIAPTSHRGRLVTQNELMVVTGQLLAFVLNAFLGTTFGNVPGIWRWMIVLAVIPAIILGIGTYFVPESPRWLMMKGRPAAARSSLEVLRSAAEVPAEIDHLKQNLAEDAKHKQASVRALKTKWIRRLVLIGIGLGVIQQIAGINVMMYYGTSILQMTGFGRDSALIANIANGVTAVAATIVTLQLLKHVPRRPMLIVGLIGSTVAITGVTFASRLPAGSPFRAFATIGMMMLFLAFFQGAISPMTWLLMSEIFPEQVRGIGMGAATFCLWLANFGVGVLFPIGLAQIGMFWTFVCFIGTNLISLLFVLIFVPETAGRSLETLHREEKARLNH

SEQ ID NO: 23438 - protein, 270 aa, Beta vulgaris
  unsure (1)..(270): unsure at all Xaa locations
AMGGLIFGYDIGISGGVTSMPDFLKKFFPSVYRKEALDKSVNQYCKFDSVTLTLFTSSLYVAALVASLVASVVTRKLGRKLSMLFGGLLFCVGAIINALAKDVAMLIVGRILLGFGVGFANQSVPLYLSEMAPYKYRGSLNIGFQLSITIGILIANVLNYFFAKIHDWGWRLSLGGAMVPAIIISIGSLLLPDTPNSMIERGKRDEALLKLKRVRGVDDVEDEFNDLVVASENSKKVEHPWRNLLQRKXRPHLTMGFXIPFFHNLLGLMX

SEQ ID NO: 23439 - protein, 527 aa, Emericella nidulans
MADAVIAGQRVEAPVTWKAYLMCVFAAFGGIFFGYDSGYINGVMGMDYFIQEFTGKVKSETPAAQFVISSSNKSLITSILSAGTFFGAIIAGDLAEWYGRRITIINGCGVFMAGVAFQIASTTVPMLVVGRLIAGVGVGFVSAIIILYMSEISPRRFRGAIVSGYQFCITIGLMLASCVNYGTENRNDSGSYRIPIALQLLWAIILGIGLFVLPESPRYYVRKNNLAEAAKTLARVRGQPPESEYITQELAEIVANNEYEMQVIPQGGYFATWLNCFRGGLRSPNSNLRRVILGTSLQMMQQWTGVNFVFYFGTTFFQNLGTIDDPFLISMITTIVNVFSTPISFYTMEKLGRRPLLLWGALGMVVCQFIVAIAGTVDGDNSKTVSAQISFICIYIFFFASTWGPGAWVVIGEIFPLPIRSRGVALSTASNWLWNCIIAVITPYMVDIDKGNLKSRVFFIWGSLCACAFVYVYFLIPETKGLTLEQVDKMMEETTPRTSAKWKPHSTFATEMGMTEKNASTTVESAA

SEQ ID NO: 23440 - protein, 533 aa, Emericella nidulans
MSILALVEDRPTPREVYNWRVYLLAAVASFTSCMIGYDSAFIGTTLSLQSFQNEFNWESLNTDLISANIVSLYQRGAFFGALFAYPIGHFWGRRWGLMFSALIFFLGAGMMLGANGDRGLGLIYGGRVLAGIGVGAGSNICPIYISEMAPSAIRGRLVGVYELGWQIGGVVGFWINYGVDETLAPSHKQWIIPFAVQLIPAGLLIIGALLIRESPRWLFLRGNREKGIETLAWIRNLPADHIYMVEEINMIEQSLEQQRVKIGLGFWKPFKAAWTNKRILYRLFLGSMLFLWQNGSGINAINYYSPRVFKSIGVSGGNTSLLTTGIFGVVTAVITFVWLLYLIDHFGRRNLLLVGAAGGSVCLWIVGGYIKIAKPENNPEGTQLDSGGIAAIFFFYLWTAFYTPSWNGTPWVINSEMFDPTVRSLAQACAAASNWLWNFLISRFTPQMFTSMGYGVYFFFASLMILSIVFVFFLIPETKGVPLESMETLFDKKPVWHAHSQLIRELRENEEAFRADMGASGKGGVTKEYVEEA

SEQ ID NO: 23441 - protein, 512 aa, Giardia lamblia ATCC 50803
MGMKDSYASSYPNTCVFFIFVLFTGLTMASTFTNMGAPIQDLYSIDIGNAYGYKGGNSPDPLSTSVTAAFSAAFFVGAFVGSLLTFPIVEKLGRKLSTIVFCVSTIVLTALMTVKTHWAYLIVIRVLAGFPASCIQTVTPLWISETCPPHRRGIATVGIQLFLTLGILLSYIMEWGLISVCRGTIKNNGSNGPYGINSSCSSSHNLWYLAFVLTIVYLVGLLIFCFFIPERVVTSTQASEQVKASTQSPDATSTELHAASVEVKTISLEQAQKPSKDDTDSASFKDCFARKDYRRCLAISIILPFLQQFTGINAVILFAGSFFTAVKMPDSSLVGAIIIGSWNFVSTIVAIPIVERMGRRFLLFLGTFILTAMLIMLIPVYVVNTDSNKENPAILACIMIGVLLYIFGFAIAPGPLVFTICGEIFPKAARVKFNSIAFAMHKLASIIVVFTFPYMQDKLWQAFVLYLVITIFFTILSWFIIPETKGKTLDEIEEVVVNEKVFEKFDMCGRVR

SEQ ID NO: 23442 - protein, 508 aa, Giardia lamblia ATCC 50803
MSHQTRNRTQIVLLVFLILAGGFNIGSVLANVPLTVLRAYAQITGGFDPDGTDARNRTIFSFLTSSIVIGSFASIFITAPIVNRIGRKAACMLFAVLVAGLLGLTLIPVNYLYLIIMRFLVGVPSTSFLIVFPAWISELSPSEIRGRLTSCLQLGNSLGTFFVYLLVIIVKHWPSTWQVPTGFTILSCIVVFVLAIPIKELPLSALPDHEQQHPHPHPHPQQSSFIEMSQTTVPASSSCTDISGVSRATILTVVENGARSATNPSSQSSDSPVPLKEIFCNRIYRRCVFISVCMPLMQQGVGVNAILLYAGSIFKQLSFPDSDVVGAALLALWCVLAGIIAIPLVEQKGRRYLIFIGMPIILFSLILLMTSYLITNQTVTTVLLLVSIFLYFLAFNFSIGPLIFTVCGESFPQRIRIRLMSFTFLIFRIISIVVMISFPYTLDILYITFFLYFCVGLVSTVLCWFSLPELKQKTPEEVEKAVLTEYVFELFTLTGKTVRRKSDVQSVN

SEQ ID NO: 23443 - protein, 211 aa, Magnetospirillum magnetotacticum
  unsure (1)..(211): unsure at all Xaa locations
MNAPTGRLGHGALTPLVVASTVGAALGGFMFGFDTAVVNGAVDALKAELGVGSALVGVIVASALLGAAVGAFAAGTIADRFGRRRLMMVAGTLFVTTSVLCAVAHDGPTLALWRFLGGVGVGMASVVAPLYIAEIAPARLRGRLATAQQMSIVLGIFAALVSNAFLVRAAGGAEAELXLGLSDWRWMFLVAVVPSLAYVVPGGLVAEFPGT

SEQ ID NO: 23444 - protein, 519 aa, Caulobacter crescentus CB15
MVVRTTACALIPVTLMSPATKGPTRTSRASTGRYGPMGRTPVASVSNAGPSAGMSADGGKVNMTFVAAIVAVATIGGFMFGYDSGVINGTQEGLESAFNLSKLGTGLNVGAILIGCAIGAFAAGRLADVWGRRTVMIISALLFVISAIGTGAAESSIVFIIFRLIGGLGVGAASVLCPVYISEVTPANIRGRLSSVQQIMIITGLTGAFVANYALAHTAGSSTAEFWLGLPAWRWMFWMQIIPAGVFFLCLLGIPESPRYLVAKGKDAQAEAILSRLFGAGQGAKKVEEIRASLSADHKPTFSDLLDPTTKKLRVILWAGLVLAVFQQLVGINIVFYYGSVLWQSVGFTEDDSLKINILSGTLSILACLLAIGLIDKIGRKPLLLIGSAGMAVTLGVLTWCFSTATTVNGALTLGDQIGLTALIAANLYVIFFNLSWGPVMWVMLGEMFPNQMRGSALAVCGFAQWIANFAISVSFPALAAASLPMTYGFYALSAVVSFFLVQKLVHETRGKELEAMQG

SEQ ID NO: 23445 - protein, 491 aa, Corynebacterium glutamicum ATCC 13032
MASTFIQADSPEKSKKLPPLTEGPYRKRLFYVALVATFGGLLFGYDTGVINGALNPMTRELGLTAFTEGVVTSSLLFGAAAGAMFFGRISDNWGRRKTIISLAVAFFVGTMICVFAPSFAVMVVGRVLLGLAVGGASTVVPVYLAELAPFEIRGSLAGRNELMIVVGQLAAFVINAIIGNVFGHHDGVWRYMLAIAAIPAIALFFGMLRVPESPRWLVERGRIDEARAVLETIRPLERAHAEVADVEHLAREEHAVSEKSMGLREILSSKWLVRILLVGIGLGVAQQLTGINSIMYYGQVVLIEAGFSENAALIANVAPGVIAVVGAFIALWMMDRINRRTTLITGYSLTTISHVLIGIASVAFPVGDPLRPYVILTLVVVFVGSMQTFLNVATWVMLSELFPLAMRGFAIGISVFFLWIANAFLGLFFPTIMEAVGLTGTFFMFAGIGVVALIFIYTQVPETRGRTLEEIDEDVTSGVIFNKDIRKGKVH

SEQ ID NO: 23446 - protein, 463 aa, Leuconostoc mesenteroides subsp. mesenteroides ATCC 8293
LFGYDTGVISGAMLFIGKELEIQTGSFEDGFITASVLLGAILGAAIIGPMSDKLGRKKLLLSAAIIFFVGALGSGIGFNYTLLVTSRVLLGIAVGAASALIPTYLAELSPADKRGGIGTLFQLMIMTGIFLAYVSNEWLSPSGWLGLNQNVGWHWMLGLAAVPAALLFIGGLSLPESPRFLVKQGKMSEAQKVLSTMNPNAKLVEEELYDIKLQANTPSGGFKELFGPMARPVLIMALGLAIFQQVMGCNTVLYYAPKIFISAGFSEHFALQSHIVIGLFNVIVTAIAVKIMDKIDRKKMLTYGAIGMGASLLTMSTAMLVLRAGNGNVGSWICVIALTLYIAFFSATWGPVMWVMIGEAFPLNIRGLGNSFGAVINWTANFAVSQSFPMLLIAFTPDHAINAEGQGIAKLFIIYGVLCFVAIWFIAKFTIETRNRSLESIESDLRSKAHAKGYLESDYVGIK

SEQ ID NO: 23447 - protein, 457 aa, Leuconostoc mesenteroides subsp. mesenteroides ATCC 8293
MKTKSKKVKLNFLHYCVYVISLGGFLFGYDTGVINGALAFMSRPDQLNLTPTLQGVVSSSLVIGACFGALGCGRVADKIGRRKTLRIIAIVFTIATVLCAVAMNFWLMSLFRFVLGLAVGAASSLSPMYLAEISPENLRSANVNKNAIFIVLGQLCAFIVNAILGNIWGHWGPIWRVMVISGAVPSIILWVNSFRISGSPQWLLLKHRFNRARKIFRRLGFKNTNQLIKSQSDQSSEQNDNEFNWSIALKNKKLFYLLVTGIVIALIQQISGVNTVMYYGTILLEKVGMGESGSLYANVLIGVVSVIASIFGTRMIEHANHHRMLIIGLIGNVVFMALLGTIMKSSVFSQGITNALVLVSLTLFLANHQGIVSPVTWLLLAEMFPGKVKAQFMSVATATTWITNFVISLIYPQLVAILGTALVFFVFAMSNGLSIVLASLFVNSKKMAKAYDTASLS

SEQ ID NO: 23448 - protein, 470 aa, Microbulbifer degradans 2-40
MTDSALPSGENKSFVILISCIATIGGFLFGFDSGVINGTVDGLVTSFGVTKTAVGVHVAFMLLGCAVGAAAAGRLADLYGRRAMLIVAAILFIVSAWGSGVATGIVEFDIYRLLGGLAVGAASVMAPAYISEVAPARYRGRLTTIQQVAIISGLTAAFLSNYVLAHTAGSSLEPFWMGIATWRWMFWIEIAPAAIFFFALMVIPESPRFLVASGKKDKALTVLTKLYGAQAAPGKVAEIDSSLDHDHKPRLSDLISKVTGKVRPIVWVGIGLATFQQLVGINVIFYYGSILWQSVGFSEDHALLINVVSGAVSIGAVVLSLVLVDKIGRKPLLWIGSAGMAVTLTLTAIAFATGTLDANGDLQLSDNMGILALVAANVYVIFFNMSWGPVMWVMLGEMFPNQIRGSGLAVAGLFQWGSNWAITMSFPALLAGLGLAVTYGFYALCAFISIIFVIKYVNETNGVELEDMEG

SEQ ID NO: 23449 - protein, 366 aa, Oenococcus oeni MCW
MSAVGFVSMVIARIILGFAVGSASALTPAYLAELADAPHRGSLGSMFQLMITLGILLAYVSNLGFLGHNLLGLRDWRWMLGSALIPALILFIGSIVLPESPRYLVEKGRIDEARSVLHYLREKTNEDPDKELADIKKVSNQPKGGFKELFTFARPAVIVAIGLMLLQQLVGINSVIYFLPQVFIKGFGFQAGNAIWISVGIGVVNFLCTVLAYNIMDKFNRRTILLFGSIVMSVSIGILSVLNFTLSIKQAAIPTMILIAIYIFGFAVSWGPICWLMIGEIFPLNIRGVGTSIGSAANWIANFIVSQFFLVLLATFHYNVGGPFAIFTFFAILSIFFVIYLVPETRGKSLEQIEMDMRRKPLPKKN

SEQ ID NO: 23450 - protein, 535 aa, Bifidobacterium longum DJO10A
MRQRGHAAGAARQRRKDKAMTTTASPVSKQTASAAQETGATGAAATAIETIETGVAGVADAATNAAANAIEDLEAAESRGFSTRFPLNSAFIFTFGALGGMLFGFDTGIISGASPLIESDFGLSVSQTGFITSSVLIGSCAGALSIGALSDRFGRKKLLIVSALLFLLGSGLCASSTGFAMMVCARIILGLAVGAASALTPAYLAELAPKERRGSLSTLFQLMVTFGILLAYASNLGFLNHNLFGIRDWRWMLGSALVPAALLLLGGLLLPESPRYLVNKGDTRNAFKVLTLIRKDVDQTQVQIELDEIKAVAAQDTKGGVRELFRIARPALVAAIGIMLFQQLVGINSVIYFLPQVFIKGFGFPEGDAIWVSVGIGVVNFVSTIVATLIMDRFPRKGMLIFGSIVMTVSLAVLAVMNFVGDVAVLAVPTMILIAFYILGFAVSWGPIAWVLIGEIFPLSVRGIGSSFGSAANWLGNFIVSQFFLVLLDAFGNNVGGPFAIFGVFSALSIPFVLRLVPETKGKSLEEIEKEMTKR

SEQ ID NO: 23451 - protein, 473 aa, Pseudomonas syringae pv. syringae B728a
MSSSSTSAAAGQQGRQRAASNRLIFISVLVATMGALAFGYDTGIIAGALPFMTLPADQGGLGLDAYSEGMVTASLIVGAAFGSLASGYISDRFGRRLTLRLLSVLFIAGALGTAIAPSIPFMIAARFVLGIAVGGGSATVPVFIAEIAGPSRRARLVSRNELMIVSGQLLAYVLSAVMAALLHTPGIWRYMLAVAMVPGVLLLVGTFFVPASPRWLASKGRFDEAQDVLEQLRPSKQDAQREVDEMKAQDEEARHRPKARELLRQRWVIKLLLIGVGLGFTAQFTGVNAFMYYTPIILKNTGMGTNAALTATIGNGVVSVIATLLGIWAIGRYGRRHLLMTGLVIVILMQAALGCVLQFMPQNMTQSYTALACILVFLLFMQMCISPVYWLLMSELFPMQVRGLLTGTAVSMQWLFNASVAFTFPIAVDTIGNPTFFIFAAINIGSLIFVFLCLPETKGKSLEQIEKHLKKEL

SEQ ID NO: 23452 - protein, 517 aa, Bifidobacterium longum NCC2705
MTTTTASPVSKQTASAAQETSATGAAATAIETIETGVAGVAGAATNAAANAIEDLEAAESHGFSTRFPLNSAFIFTFGALGGMLFGFDTGIISGASPLIESDFGLSVSQTGFITSSVLIGSCAGALSIGALSDRFGRKKLLIVSALLFLLGSGLCASSTGFAMMVCARIILGLAVGAASALTPAYLAELAPKERRGSLSTLFQLMVTFGILLAYASNLGFLNHNLFGIRDWRWMLGSALVPAALLLLGGLLLPESPRYLVNKGDTRNAFKVLTLIRKDVDQTQVQIELDEIKAVAAQDTKGGVRELFRIARPALVAAIGIMLFQQLVGINSVIYFLPQVFIKGFGFPEGDAIWVSVGIGVVNFVSTIVATLIMDRFPRKGMLIFGSIVMTVSLAVLAVMNFVGDVAVLAVPTMILIAFYILGFAVSWGPIAWVLIGEIFPLSVRGIGSSFGSAANWLGNFIVSQFFLVLLDAFGNNVGGPFAIFGVFSALSIPFVLRLVPETKGKSLEEIEKEMTKR

SEQ ID NO: 23453 - protein, 473 aa, Pseudomonas syringae pv. tomato str. DC3000
MSSSSTTAAADTQGRQNASPNRLIFISVLVATMGALAFGYDTGIIAGALPFMTLPADQGGLGLNAYSEGMITASLIVGAAFGSLASGYISDRFGRRLTLRLLSVLFIAGALGTAIAPSIPFMVAARFLLGIAVGGGSATVPVFIAEIAGPSRRARLVSRNELMIVSGQLLAYVLSAVMAALLHTPGIWRYMLAIAMVPGVLLLIGTFFVPPSPRWLASKGRFDEAQDVLEQLRSNKDDAQREVDEMKAQDEQARNRPKAKELLRQRWVIKLLLIGIGLGFTAQLTGVNAFMYYTPIILKNTGMGTNAALTATIGNGVVSVIATLLGIWAIGRYGRRHLLMTGLVMVILMQAALGCVLQFMPQNLTQSYTALACILVFLLFMQMCISPVYWLLMSELFPMQVRGLLTGTAVSMQWLFNASVAFTFPIAVDTIGNPTFFIFAAINVGSLIFVFLCLPETKGKSLEQIEKHLKKEL

SEQ ID NO: 23454 - protein, 468 aa, Bacteroides thetaiotaomicron VPI-5482
MKSTINFGYLIFLSVVAALGGFLFGYDTAVISGTIAQVTQLFQLDTLQQGWYVGCALIGSIVGVLFAGILSDKLGRKMTMIISATLFSTSALGCAISADFTQLVVYRIIGGVGIGVVSIVSPLYISEVAVAQYRGRLVSLYQLAVTVGFLGAYLINYQLLAYAESGNQLSMDWLNKIFVTEVWRGMLGMETLPAVLFFIIIFFIPESPRWLIVRGKEEKAVNILERIYNSVSEAASQLKETKSVLTSETKSEWAMLMKPGIFKAVIIGVCIAILGQFMGVNAVLYYGPSIFENAGLSGGDSLFYQVLVGLVNTLTTVLALVIIDRVGRKQLVYYGVSGMVVSLLLIGVYFLFGDSWGVSSLFLLVFFLFYVFCCAVSICAVVFVLLSEMYPTKVRGLAMSIAGFALWIGTYLIGQLTPWMLQNLTPAGTFFLFAVMCVPYMLIVWKLVPETTGKSLEEIERYWTRSEQ

SEQ ID NO: 23455 - protein, 468 aa, Bacteroides thetaiotaomicron VPI-5482
MKTTINLGYIIFLSVVAALGGFLFGYDTAVISGTIAQVTHLFQLDTLQQGWYVGCALIGSIVGVLFSGILSDSIGRKRTMILSAILFSTSAIGCAFCIDFNQLVVYRIIGGIGIGVVSIVSPLYISEVSVAQFRGRMVSLYQLAVTVGFLGAYLVNYQLLAYSESGNHLPIAWLEKIVVTEVWRGMLGMETLPAIIFFIIIFFIPESPRWLIVKGQERKATYILEKIYNSFKEADFQLNETKSVLVSETRSEWSILLKPGILKAVIIGVCIAILGQFMGVNAVLYYGPSIFENAGLSGGDSLFYQVLVGLVNTLTTILALLIIDKVGRKKLIYYGVSGMVVSLILIGSYFLFGNAWNISSLFLLAFFLCYVFCCAISICAVIFVLLSEMYPTKIRGLAMSIAGFALWIGTYLIGQLTPWMLQNLTPAGTFFLFAIMCVPYMLIVWKLVPETTGKSLEEIERYWTRSER

SEQ ID NO: 23456 - protein, 470 aa, Streptomyces avermitilis MA-4680
MTSTAQAPGAREAHPEHLGHVIFIAAAAAMGGFLFGYDSAVINGAVEAIRSKYDIGSATLAQVIAIALIGCAVGAATAGRIADRIGRIRCMQIAAVLFTASAIGSALPFALWDLAFWRVIGGFAIGMASVIGPAYIAEVAPAAYRGRLGSFQQAAIVIGIAISQLVNWAILNAAGGDQRGKLLGLEAWQVMLGVMVVPAVLYGLLSFAIPESPRYLIEAGKDARAREVLEEVEGKEIDLDARVEEIRLAMYREEKPSFKDLLGGTFFFKPIVWVGIGLSVFQQFVGINVAFYYSATLWQSVGVDPTDSFLYSFTTSIINIIGTVIAMIFVDRVGRKPLAIIGSVGMVIGLALEAWAFSYDLVDGKLPATQGWVALIAAHVFVLFFALSWGVVVWVFLGEMFPNRIRAAALGVAASAQWIANWAITASFPSLADWSLSGTYIIYTVFAALSIPFVLKFVKETKGKALEEMG

SEQ ID NO: 23457 - protein, 485 aa, Thermoplasma acidophilum
MENGVRYSDLIERLDMSRVTRFYWLLTILATIGGFLFGYDTSNIGSALPLLERIYPGISGFVEGYLVAGASLGAAVGAIIAAGLTDRYGRKYLLIADAAIYAAGALLSAFTVDLVMLLLSRTLIGIAVGADSGIATAYIAEYAPKARRGSLGILQQWMITIGILAAYLIGMATLFFAPGLAYAVGWRIMLGVAAIPAIIGLAFRFMMPESPRWLLVNGKYKEASASLKRLGLNMSEEDLKSVKLSQPHKITPGVKRALLIVGLFFVFQQITGINIPFYYGPVVLENLHIVGKSTSLVYSIYYSIAASAILAIINVAATYIGFRYIDSVGRRKLALMGYAGMTFFGILGGILLYLKLDIGLFIAFAGFIIFFAFGVGGTGWMIQGEYFPTSMRGLYASLGAFIDWIANFAIIELFPVMDSAITIKNVEFVFGVLSLIALILFYYIMPETKGLSVEQIDTLFENNSLGQMKHASISMKKESVPADPK

SEQ ID NO: 23458 - protein, 570 aa, Saccharomyces pastorianus
MSHVNASYAHSQGSSTSVSRVEMEKPATKEVFEDPTPKKFELDDDEAGKTSSVFNPDLNLEEEVRALDELGDSFKRDRSFWGKMKALEFEVEFENKKNMVLMLGTFAAFAGILSGIDQSIISGASIGMNKMLHLSTHEASLVSSLMPLGAVAGSILLTPFSEYFGRKKSLAISCVFYTIGAIVCAAASNHHEMYAGRFLIGVGVGLEGGGIGVYIAESVPSSVRGSLVSLYQFNIALGELFGYIVGVIFFDVKGGWRYMVGSSLVFSTTLFIGLLFLPESPRWLMHKGRVGESWNVWKRLRDVKEEGNKIEFLELRDVASHDRELHANESRFQSLFDLVRVPRNRRALVYSCMMIGLGQLTGINAIMYYMSTLMKNIGFDDKQSVAMSMVGGAALLIGTVPAILWMDRFGRRTWAMTIIIFIVGLVLVGVGYQINLKTHMAAAEGVYLTGQIIYNMAFGSYAALTWVLPSESFSLGTRSAGMTVSSALLYLFAFTVTYNFEKMKEAMTYTGLTLGFYGGIALAIGIPYQLLCMPETKNRTLEEIDDIFEKPTSQIIKENIAYLKKGQLSY

SEQ ID NO: 23459 - protein, 566 aa, Kluyveromyces lactis
MSELETGTAAHGTPVENKSVSSSQASTPTNVGSRDDLKVDDDNHSVDAIELPKKPRSAYITVSILCLMVAFGGFVFGWDTGTISGFVNQTDFIRRFGQEKADGSHYLSNVRTGLIVSIFNIGCAIGGIILSKLGDMYGRRIGLMIVVLIYVVGIIIQIASIDKWYQYFIGRIISGLGVGGISVLSPMLISETAPKHIRGTLVSFYQLMITFGIFLGYCTNYGTKTYSNSVQWRVPLGLCFAWAIFMITGMLFVPESPRFLVEKDRIDEAKRSIAKSNKVSYEDPAVQAEVDLICAGVEAERLAGSASIKELFSTKTKVFQRLIMGMLIQSFQQLTGNNYFFYYGTTIFNSVGMDDSFETSIVLGIVNFASTFVAIYVVDKFGRRKCLLWGAAAMTACMVVFASVGVTRLWPDGANHPETASKGAGNCMIVFACFYIFCFATSWAPIAYVVVAESYPLRVKAKCMAIATASNWIWGFLNGFFTPFITSAIHFYYGYVFMGCLVAMFFYVFFFVPETKGLTLEEVQEMWEEGVLPWKSSSWVPSSRRNAGYDVDALQHDEKPWYKAML

SEQ ID NO: 23460 - protein, 519 aa, Vitis vinifera
MPAVGGFDKGTGKAYPGNLTPYVTVTCVVAAMGGLIFGYDIGISGGVTSMAPFLQKFFPSVYRKEALDKSTNQYCKFDSETLTLFTSSLYLAALLSSLVAATVTRKFGRKLSMLFGGLLFCAGAIINGAAKAVWMLIVGRILLGFGIGFANQSVPLYLSEMAPYKYRGALNIGFQLSITIGILVANILNYFFAKIKGGWGWRLSLGGAVVPALIITVGSLVLPDTPNSMIERGQHEGAKTKLRRIRGVDDVEEEFNDLVVASEASKLVEHPWRNLLQRKYRPHLTMAILIPFFQQLTGINVIMFYAPVLFKTIGFADDASLMSAVITGGVNVLATIVSIYGVDKWGRRFLFLEGGTQMLICQVIVATCIGVKFGVDGEPGALPKWYAIVVVLFICVYVSGFAWSWGPLGWLVPSEIFPLEIRSAAQSVNVSVNMFFTFIIAQIFLNMLCHMKFGLFLFFAFFVVVMSFFIYFFLPETKGIPIEEMAEVWKSHWFWSRYVNDGSYSGVELVKENYPVKNV

SEQ ID NO: 23461 - protein, 519 aa, Vitis vinifera
MPAVGGFDKGTGKAYPGNLTPYVTVTCVVAAMGGLIFGYDIGISGGVTSMAPFLQKFFPSVYRKEALDKSTNQYCKFDSETLTLFTSSLYLAALLSSLVAATVTRKFGRKLSMLFGGLLFCAGAIINGAAKAVWMLIVGRILLGFGIGFANQSVPLYLSEMAPYKYRGALNIGFQLSITIGILVANILNYFFAKIKGGWGWRLSLGGAVVPALIITVGSLVLPDTPNSMIERGQHEGAKTKLRRIRGVDDVEEEFNDLVVASEASKLVEHPWRNLLQRKYRPHLTMAILIPFFQQLTGINVIMFYAPVLFKTIGFADDASLMSAVITGRVNVLATIVSIYGVDKWVRRFLFLEGGTQMLICQVIVATCILVKFGVDGEPWCLPKWYAIVVVLFICVYVSGFAWSWGPLGWLVPSEIFPLEIRSAAQSVNVSVNMFFTFIIAQIFLNMLCHMKFGLFLSFAFFVVVMSFFIYFFLPETKGIPIEEMAEVWKSHWFWSRYVNDGSYSGVELVKENYPVKNV

SEQ ID NO: 23462 - protein, 442 aa, Ralstonia solanacearum
MANNVSIEDVPLNGFHQLLSIRSGGGWVLDGYVLSIIGVAMVQLSAALHLSGFWQGMVAASALIGIFCGGFLGGLLTGCLGRQKLYFFGPTIFVVCSLAQFWADSGAALFFFRFLIGVGVGFEYPVAGSLLVEFMPRKDRGPRLAMLTILWFAGAALAYMVGNAILDTGRADAWRLVLASPAVIGALLLLVRIGTPESPRWLLSKGRAAEAERVIQQVYGPQFSLENLPEQRPEKKVSLLSLLHSGYGKRMLFVSVFWSCSVIPVFAVYAFAPTVLQALHLKGAWASFGSVAITLLFVVGCFVATRLINTVGRRSMLIHSFLWSGLALLGLGLFCDGSEMLVLVLFGAYAVFIGGAQVLQLVYPNELFPTEIRSAAVGMGASLSRIGAAIGTWAVPVALQGIGVGNTMFAAAGVTLFGLLVSLAIAPETRALSLQEAASLSR

SEQ ID NO: 23463 - protein, 534 aa, Chlorella kessleri
MAGGAIVASGGASRSSEYQGGLTAYVLLVALVAACGGMLLGYDNGVTGGVASMEQFERKFFPDVYEKKQQIVETSPYCTYDNPKLQLFVSSLFLAGLISCIFSAWITRNWGRKASMGIGGIFFIAAGGLVNAFAQDIAMLIVGRVLLGFGVGLGSQVVPQYLSEVAPFSHRGMLNIGYQLFVTIGILIAGLVNYGVRNWDNGWRLSLGLAAVPGLILLLGAIVLPESPNFLVEKGRTDQGRRILEKLRGTSHVEAEFADIVAAVEIARPITMRQSWRSLFTRRYMPQLLTSFVIQFFQQFTGINAIIFYVPVLFSSLGSASSAALLNTVVVGAVNVGSTMIAVLLSDKFGRRFLLIEGGITCCLAMLAAGITLGVEFGQYGTEDLPHPVSAGVLAVICIFIAGFAWSWGPMGWLIPSEIFTLETRPAGTAVAVMGNFLFSFVIGQAFVSMLCAMKFGVFLFFAGWLVIMVLCAIFLLPETKGVPIERVQALYARHWFWKKVMGPAAQEIIAEDEKRVAASQAIMKEERISQTMK

SEQ ID NO: 23464 - protein, 533 aa, Chlorella kessleri
MAGGGVVVVSGRGLSTGDYRGGLTVYVVMVAFMAACGGLLLGYDNGVTGGVVSLEAFEKFFPDVWAKKQEVHEDSPYCTYDNAKLQLFVSSLFLAGLVSCLFASWITRNWGRKVTMGIGGAFFVAGGLVNAFAQDMAMLIVGRVLLGFGVGLGSQVVPQYLSEVAPFSHRGMLNIGYQLFVTIGILIAGLVNYAVRDWENGWRLSLGLAAAPGAILFLGSLVLPESPNFLVEKGKTEKGREVLQKLRGTSEVDAEFADIVAAVEIARPITMRQSWASLFTRRYMPQLLTSFVIQFFQQFTGINAIIFYVPVLFSSLGSANSAALLNTVVVGAVNVGSTLIAVMFSDKFGRRFLLIEGGIQCCLAMLTTGVVLAIEFAKYGTDPLPKAVASGILAVICIFISGFAWSWGPMGWLIPSEIFTLETRPAGTAVAVVGNFLFSFVIGQAFVSMLCAMEYGVFLFFAGWLVIMVLCAIFLLPETKGVPIERVQALYARHWFWNRVMGPAAAEVIAEDEKRVAAASAIIKEEELSKAMK

SEQ ID NO: 23465 - protein, 540 aa, Chlorella kessleri
MAGGGPVASTTTNRASQYGYARGGLNWYIFIVALTAGSGGLLFGYDIGVTGGVTSMPEFLQKFFPSIYDRTQQPSDSKDPYCTYDDQKLQLFTSSFFLAGMFVSFFAGSVVRRWGRKPTMLIASVLFLAGAGLNAGAQDLAMLVIGRVLLGFGVGGGNNAVPLYLSECAPPKYRGGLNMMFQLAVTIGIIVAQLVNYGTQTMNNGWRLSLGLAGVPAIILLIGSLLLPETPNSLIERGHRRRGRAVLARLRRTEAVDTEFEDICAAAEESTRYTLRQSWAALFSRQYSPMLIVTSLIAMLQQLTGINAIMFYVPVLFSSFGTARHAALLNTVIIGAVNVAATFVSIFSVDKFGRRGLFLEGGIQMFIGQVVTAAVLGVELNKYGTNLPSSTAAGVLVVICVYVAAFAWSWGPLGWLVPSEIQTLETRGAGMSMAVIVNFLFSFVIGQAFLSMMCAMRWGVFLFFAGWVVIMTFFVYFCLPETKGVPVETVPTMFARHWLWGRVMGEKGRALVAADEARKAGTVAFKVESGSEDGKPASDQ

SEQ ID NO: 23466 - protein, 534 aa, Chlorella kessleri
MAGGGVVVVSGRGLSTGDYRGGLTVYVVMVAFMAACGGLLLGYDNGVTGGVVSLEAFEKKFFPDVWAKKQEVHEDSPYCTYDNAKLQLFVSSLFLAGLVSCLFASWITRNWGRKVTMGIGGAFFVAGGLVNAFAQDMAMLIVGRVLLGFGVGLGSQVVPQYLSEVAPFSHRGMLNIGYQLFVTIGILIAGLVNYAVRDWENGWRLSLGPAAAPGAILFLGSLVLPESPNFLVEKGKTEKGREVLQKLCGTSEVDAEFADIVAAVEIARPITMRQSWASLFTRRYMPQLLTSFVIQFFQQFTGINAIIFYVPVLFSSLGSANSAALLNTVVVGAVNVGSTLIAVMFSDKFGRRFLLIEGGIQCCLAMLTTGVVLAIEFAKYGTDPLPKAVASGILAVICIFISGFAWSWGPMGWLIPSEIFTLETRPAGTAVAVVGNFLFSFVIGQAFVSMLCAMEYGVFLFFAGWLVIMVLCAIFLLPETKGVPIERVQALYARHWFWNRVMGPAAAEVIAEDEKRVAAASAIIKEEELSKAMK

SEQ ID NO: 23467 - protein, 516 aa, Blumeria graminis
MHRTFHPYFLLKMSGSSQRHSHVTGYLILLVAVATLGPLQYGYHLAELNAPQDVITCHSLLGRQNVASKSLSNPSQCIPMTEAEFAALSSIYILGGLAGAITAGPISSSHGRLLTMRITGIFFILGSLIETIAESVPVMSTGRFLAGLGAGAATVVAPMYISEISPAEKRGLFGTMTQAMISVGIFVTQSLGYFFSRGMLWRIILGVGAGFGLLLGAGLCFIPESPSWLASHHNPTLAVKTLQRIRGAGTPIHKETAGWNVQEINGEEERLIRPSDLSSTSQYNQHNLATPNLKLPSVGFFGVLQDPLYRPAIMAVCGIMIAQQLSGINSIMMYSVSLLRGVLPIPSILLTIIMSAMNVITTIVCAPLADRIGRKSCLLLSIAGMGTMSLLLAISLRMEWKLFSAIAVISFVAFFATGLGPVPYIMASELVGQEAVGAAQSWALAANYLASFLVAQFFPLLNSWMNNRWGGAGWVYFIFTAFAGVSWIFVTYYVPETNGKTGPDEVWGRTTGEVAD

SEQ ID NO: 23468 - protein, 82 aa, Betula pendula
GFAWSWGPLSWLIPSEIFPMKIRSTGQSISVAVQFAATFVLSQTFLSMLCHFKFGTFLFYSGWIAIMTLFVALFLPETKGIN

SEQ ID NO: 23469 - protein, 82 aa, Betula pendula
GFAWSWGPLGWLIPSEIFPLETRSSGFFFAVSMNMFCTFLIAQAFLTMLCWMQSAIFYFFAAWIVVMCSFAIFMLPETKGIP

SEQ ID NO: 23470 - protein, 469 aa, Azotobacter vinelandii
MQTSTYTSDQTAQVAPARKDLAALIAIVAALGGLLFGYDTGIIGVALLGLSQDFVLNDTLKQFVTGAIIFGALFGCLLTGPISDRIGRRRTIIGVGLVFALGSLLSALSPSVGFLVVSRFLLGLSAGSSTQIIPVYIAEVAPPQHRGKLVVLFQLMVMTGITVAYFTGFALGEHWRWMFGLGVVPALILLAGMAILPESPRWLLVRGREAAALSVLTHVRGDAHWAARELEEIKTVSREPQGTWRDLRLPWIRPAVIVGGAIAMFSQITGVNAMIYYAPTILTQAGFSTDTAVLATGSSTILVVLMTWFGSVLVDRIGRRRYLLWLIPGSIAALIGMGLLFQSGGPTTTLEQWLVVLCLAGYLMLNCGGFGVCIWLINSEVYPLFIRGKGASVGAFSHWFFDLLVTLTTLSLVTALGAANTFWMYAAISTGALLFIWRYVPETRGKSLEQIEHELREHRFYPFQQKTEH

SEQ ID NO: 23471 - protein, 500 aa, Azotobacter vinelandii
MAEFWTPRTTTRARDMNDKTVAPQQHDISYVLRICAVAALGGLLFGYDTAVISGAVEALQQYFSLSPAETGWAVSNVVVGCIVGALGAGWVAGRLGRKKALVLSAILFTVSAIGAAVVDSFVWFVIYRIVGGLAVGIASTVSPMYMSEVSPKDIRGRALGMQSFAIVGGQVVVFYVNYLIAKGAADTWLVEYGWRWMLGSEVVPCILFCLFVFSIPESPRWQAMVGQDERALRTLRRISNDAHAHHLLNEIKHSLHQDSQGRTQKPNLREAGLALILFVGCMLAMLQQVTGVNVMMYYAPMVLKGVTGSTESALFQTIWIGVMQLVGTIIGTWLIDRVGRLPLMRVGTVGIVASLLLTSYALYAQESGYLALIGMLLFMVLFAISWGVGTWVLISEIFPNHMRSMGMSMAVCSMWIANFLVTQSFPMLNEHPVLIERFHGAFPMWVFAGCCVFCYWFVARFVPETRGVSLERMEEVMLAKLKRQPLADEEESAALRSSRA

SEQ ID NO: 23472 - protein, 481 aa, Azotobacter vinelandii
MMLSKERYKAAYVYWLCCIATLGGVMFGFSTGVISGSVELIQQYFHLSPAETGWIVSSIFVGCVLGALAAGKLADRIGRKSTLLLSTLAFAISAYGTTFADSFAIFSSARIVAGIGIGLASTVVPLYMGEIAPRDIRGKASGIWDLSLLGSQTLVFLVNFLIGKGMTEAWLVEVGWRWMMGAQFVPVALMLVCTLILPESPTWCIDTRRVERAIKVLSKIYPDLNHEEARQFFSARETAGGSLGLGVILRTPVLRYGLIVGCAIGVLQQFTGAAIVMYYAPVILQTGDMSKDALLFQTIFIGLFTGIASFVGMTLFDRFGRRPVMKFGTIGSIVGLLLISYSMYTHHSGYLSIFAALFFMAMFGISWSAGCWVLLSEIFPPRIRSHATGLAVTLMWAFNFLVTQFFPMINEIPVLQESFNGAFTMWIFVAFNLFCLFFLIRYLPETRGVALDDMEALIESHRRKLSRKTGETRTSIAVSDI

SEQ ID NO: 23473 - protein, 82 aa, Chenopodium rubrum
GFAWSWGPLGWLVPSEIFPLEIRSAAQSINVSVNMFFTFVIAQIFLTMLCHLKFGLFLFFAFFVVIMSVFVYLFLPETKGIP

SEQ ID NO: 23474 - protein, 82 aa, Chenopodium rubrum
GFAWSWGPLGWLIPSETFPIETRTAGFAFAVSSNMMFTFLIAQAFLSMLCHMRAYIFIFFSVWIVVMGLFVVFLLPETKGIP

SEQ ID NO: 23475 - protein, 504 aa, Plasmodium falciparum 3D7
MTKSSKDICSENEGKKNGKSGFFSTSFKYVLSACIASFIFGYQVSVLNTIKNFIVVEFEWCKGEKDRLNCSNNTIQSSFLLASVFIGAVLGCGFSGYLVQFGRRLSLLIIYNFFFLVSILTSITHHFHTILFARLLSGFGIGLVTVSVPMYISEMTHKDKKGAYGVMHQLFITFGIFVAVMLGLAMGEGPKADSTEPLTSFAKLWWRLMFLFPSVISLIGILALVVFFKEETPYFLFEKGRIEESKNILKKIYETDNVDEPLNAIKEAVEQNESAKKNSLSLLSALKIPSYRYVIILGCLLSGLQQFTGINVLVSNSNELYKEFLDSHLITILSVVMTAVNFLMTFPAIYIVEKLGRKTLLLWGCVGVLVAYLPTAIANEINRNSNFVKILSIVATFVMIISFAVSYGPVLWIYLHEMFPSEIKDSAASLASLVNWVCAIIVVFPSDIIIKKSPSILFIVFSVMSILTFFFIFFFIKETKGGEIGTSPYITMEERQKHMTKSVV

SEQ ID NO: 23476 - protein, 475 aa, Prunus armeniaca
MSTLKARSVQARASDGDLENLVPSKPQGKSSGTVFPFVGVACLGAILFGYHLGVVNGALEYLSKDLGIAENAVLQGWVVSALLAGATVGSFTGGALADKFGRTRTFQLDVIPLAIGAFLCATSQSVQTMIVGRYLLAVGIGITSAIVPLYISEISPTEIRGALGSVNQLFICIGILGALVAGLPLAANPLWWRTMFGVAIVPSVLLALGMAASPESPRWLFQQGKISEAEKAIKTLYGKERVSEVMHDLTSATQGSVEPEAGWFDLFSSRYWKVVSVGAALFLFQQLAGINAVVYYSTSVFRSAGITSDVAASALVGAANVFGTAVASSLMDRQGRESLLLISFGGMAASMLLLSLSFTWKVLAPYSGPLAVAGTVLYVLSFSLGAGPVPALLLPEIFASRIRAKAVSLSLGMHWISNFVIGLYFLSFVTKFGISSVYLGFAGVCLLAVLYISGNVVETKGRSLEEIERALSVST

SEQ ID NO: 23477 - protein, 522 aa, Arabidopsis thaliana
MPAGGFVVGDGQKAYPGKLTPFVLFTCVVAAMGGLIFGYDIGISGGVTSMPSFLKRFFPSVYRKQQEDASTNQYCQYDSPTLTMFTSSLYLAALISSLVASTVTRKFGRRLSMLFGGILFCAGALINGFAKHVWMLIVGRILLGFGIGFANQAVPLYLSEMAPYKYRGALNIGFQLSITIGILVAEVLNYFFAKIKGGWGWRLSLGGAVVPALIITIGSLVLPDTPNSMIERGQHEEAKTKLRRIRGVDDVSQEFDDLVAASKESQSIEHPWRNLLRRKYRPHLTMAVMIPFFQQLTGINVIMFYAPVLFNTIGFTTDASLMSAVVTGSVNVAATLVSIYGVDRWGRRFLFLEGGTQMLICQAVVAACIGAKFGVDGTPGELPKWYAIVVVTFICIYVAGFAWSWGPLGWLVPSEIFPLEIRSAAQSITVSVNMIFTFIIAQIFLTMLCHLKFGLFLVFAFFVVVMSIFVYIFLPETKGIPIEEMGQVWRSHWYWSRFVEDGEYGNALEMGKNSNQAGTKHV

SEQ ID NO: 23478 - protein, 522 aa, Arabidopsis thaliana
MPAGGFVVGDGQKAYPGKLTPFVLFTCVVAAMGGLIFGYDIGISGGVTSMPSFLKRFFPSVYRKQQEDASTNQYCQYDSPTLTMFTSSLYLAALISSLVASTVTRKFGRRLSMLFGGILFCAGALINGFAKHVWMLIVGRILLGFGIGFANQAVPLYLSEMAPYKYRGALNIGFQLSITIGILVAEVLNYFFAKIKGGWGWRLSLGGAVVPALIITIGSLVLPDTPNSMIERGQHEEAKTKLRRIRGVDDVSQEFDDLVAASKESQSIEHPWRNLLRRKYRPHLTMAVMIPFFQQLTGINVIMFYAPVLFNTIGFTTDASLMSAVVTGSVNVGATLVSIYGVDRWGRRFLFLEGGTQMLICQAVVAACIGAKFGVDGTPGELPKWYAIVVVTFICIYVAGFAWSWGPLGWLVPSEIFPLEIRSAAQSITVSVNMIFTFIIAQIFLTMLCHLKFGLFLVFAFFVVVMSIFVYIFLPETKGIPIEEMGQVWRSHWYWSRFVEDGEYGNALEMGKNSNQAGTKHV

SEQ ID NO: 23479 - protein, 522 aa, Arabidopsis thaliana
MPAGGFVVGDGQKAYPGKLTPFVLFTCVVAAMGGLIFGYDIGISGGVTSMPSFLKRFFPSVYRKQQEDASTNQYCQYDSPTLTMFTSSLYLAALISSLVASTVTRKFGRRLSMLFGGILFCAGALINGFAKHVWMLIVGRILLGFGIGFANQAVPLYLSEMAPYKYRGALNIGFQLSITIGILVAEVLNYFFAKIKGGWGWRLSLGGAVVPALIITIGSLVLPDTPNSMIERGQHEEAKTKLRRIRGVDDVSQEFDDLVAASKESQSIEHPWRNLLRRKYRPHLTMAVMIPFFQQLTGINVIMFYAPVLFNTIGFTTDASLMSAVVTGSVNVAATLVSIYGVDRWGRRFLFLEGGTQMLICQAVVAACIGAKFGVDGTPGELPKWYAIVVVTFICIYVAGFAWSWGPLGWLVPSEIFPLEIRSAAQSITVSVNMIFTFIIAQIFLTMLCHLKFGLFLVFAFFVVVMSIFEYIFLPETKGIPIEEMGQVWRSHWYWSRFVEDGEYGNALEMGKNSNQAGTKHV

SEQ ID NO: 23480 - protein, 514 aa, Arabidopsis thaliana
MAGGAFVSEGGGGGRSYEGGVTAFVIMTCIVAAMGGLLFGYDLGISGGVTSMEEFLTKFFPQVESQMKKAKHDTAYCKFDNQMLQLFTSSLYLAALVASFMASVITRKHGRKVSMFIGGLAFLIGALFNAFAVNVSMLIIGRLLLGVGVGFANQSTPVYLSEMAPAKIRGALNIGFQMAITIGILVANLINYGTSKMAQHGWRVSLGLAAVPAVVMVIGSFILPDTPNSMLERGKNEEAKQMLKKIRGADNVDHEFQDLIDAVEAAKKVENPWKNIMESKYRPALIFCSAIPFFQQITGINVIMFYAPVLFKTLGFGDDAALMSAVITGVVNMLSTFVSIYAVDRYGRRLLFLEGGIQMFICQLLVGSFIGARFGTSGTGTLTPATADWILAFICVYVAGFAWSWGPLGWLVPSEICPLEIRPAGQAINVSVNMFFTFLIGQFFLTMLCHMKFGLFYFFASMVAIMTVFIYFLLPETKGVPIEEMGRVWKQHWFWKKYIPEDAIIGGHDDNNTN

SEQ ID NO: 23481 - protein, 514 aa, Arabidopsis thaliana
MAGGFVSQTPGVRNYNYKLTPKVFVTCFIGAFGGLIFGYDLGISGGVTSMEPFLEEFFPYVYKKMKSAHENEYCRFDSQLLTLFTSSLYVAALVSSLFASTITRVFGRKWSMFLGGFTFFIGSAFNGFAQNIAMLLIGRILLGFGVGFANQSVPVYLSEMAPPNLRGAFNNGFQVAIIFGIVVATIINYFTAQMKGNIGWRISLGLACVPAVMIMIGALILPDTPNSLIERGYTEEAKEMLQSIRGTNEVDEEFQDLIDASEESKQVKHPWKNIMLPRYRPQLIMTCFIPFFQQLTGINVITFYAPVLFQTLGFGSKASLLSAMVTGIIELLCTFVSVFTVDRFGRRILFLQGGIQMLVSQIAIGAMIGVKFGVAGTGNIGKSDANLIVALICIYVAGFAWSWGPLGWLVPSEISPLEIRSAAQAINVSVNMFFTFLVAQLFLTMLCHMKFGLFFFFAFFVVIMTIFIYLMLPETKNVPIEEMNRVWKAHWFWGKFIPDEAVNMGAAEMQQKSV

SEQ ID NO: 23482 - protein, 517 aa, Arabidopsis thaliana
MAGGAFVSEGGGGGNSYEGGVTVFVIMTCIVAAMGGLLFGYDLGISGGVTSMEEFLSKFFPEVDKQMHEARRETAYCKFDNQLLQLFTSSLYLAALASSFVASAVTRKYGRKISMFVGGVAFLIGSLFNAFATNVAMLIVGRLLLGVGVGFANQSTPVYLSEMAPAKIRGALNIGFQMAITIGILIANLINYGTSQMAKNGWRVSLGLAAVPAVIMVIGSFVLPDTPNSMLERGKYEQAREMLQKIRGADNVDEEFQDLCDACEAAKKVDNPWKNIFQQAKYRPALVFCSAIPFFQQITGINVIMFYAPVLFKTLGFADDASLISAVITGAVNVVSTLVSIYAVDRYGRRILFLEGGIQMIVSQIVVGTLIGMKFGTTGSGTLTPATADWILAFICLYVAGFAWSWGPLGWLVPSEICPLEIRPAGQAINVSVNMFFTFLIGQFFLTMLCHMKFGLFYFFGGMVAVMTVFIYFLLPETKGVPIEEMGRVWKQHPFWKRYMPDDAVIGGGEENYVKEV

SEQ ID NO: 23483 - protein, 514 aa, Arabidopsis thaliana
MAGGAFIDESGHGGDYEGRVTAFVMITCIVAAMGGLLFGYDIGISGGVISMEDFLTKFFPDVLRQMQNKRGRETEYCKYDNELLTLFTSSLYLAALFASFLASTITRLFGRKVSMVIGSLAFLSGALLNGLAINLEMLIIGRLFLGVGVGFANQSVPLYLSEMAPAKIRGALNIGFQLAITIGILAANIVNYVTPKLQNGIGWRLSLGLAGVPAVMMLVGCFFLPDTPNSILERGNKEKAKEMLQKIRGTMEVEHEFNELCNACEAAKKVKHPWTNIMQARYRPQLTFCTFIPFFQQLTGINVIMFYAPVLFKTIGFGNDASLISAVITGLVNVLSTIVSIYSVDKFGRRALFLQGGFQMIVTQIAVGSMIGWKFGFNGEGNLSGVDADIILALICLYVAGFAWSWGPLGWLVPSEICPLEIRSAGQSLNVSVNMFFTFFIGQFFLTMLCHMKFGLFYFFAGMVLIMTIFIYFLLPETKGVPIEEMGKVWKEHRYWGKYSNNDDGDDVDDDAYF

SEQ ID NO: 23484 - protein, 481 aa, Malus x domestica
MTSILLGYDIGVMSGASLFIKENLKISDVQVEIMNGTLNLYSLIGSALAGRTSDWIGRRYTIVLAGTIFFIGALLMGFAPNYAFLMFGRFVAGVGVGYALMIAPVYTAEISPASFRGFLTSFPEVFVNIGILLGYVSNYAFSKLPIHLNWRIMLGVGAFPSVILAVGVLAMPESPRWLVMQGRLGDAKRVLQKTSESIEECQLRLDDIKEAAGIPKESNDDVVQVSKRSHGEGVWKELLLHPTPAVRHILIAALGIHFFEQSSGIDSVVLYSPRIFEKAGITSYDHKLLATVAVGVVKTICILVATVFLDKFGRRPLLLTSVAGMVFSLSCLGASLTIVDQQHGKIMWAIVLCITMVLLNVAFFSIGLGPITWVYSSEIFPLQLRAQGCSMGVAVNRVTSGVISMTFISLYKAITIGGAFFLYAGIAAVGWVFFYMLYPETQGRTLEDMEVLFGKYHKWREANALLQKAKQVDGDDKGQVH

SEQ ID NO: 23485 - protein, 76 aa, Prunus persica
WGPLGWLVPSEIFPLEIRSAAQSVNVSVNMIFTFLVAQIFLTMLCHLKFGLFLFFAFFVFVMSIFIYYFLPGTKGV

SEQ ID NO: 23486 - protein, 76 aa, Prunus persica
WGPLGWTVPSEIFPLETRSAGQSITVAVNLLFTFIIAQSFLALLCALKFGIFLFFAGWITVMTVFVYVFLPGTKGV

SEQ ID NO: 23487 - protein, 530 aa, Poncirus trifoliata
MIESGAYNNYTLVQDPLLESRKRSLALTGLLLVLIYFGSTMIPNIWTAFKFTGATTAVSLGFIFPPLVALRLRKEGPGLSLGEKFLSGLMLVLAILGWLLTHSLIAKAVVAACIGAKFGIDGNPGELPKWYAIVVVLFFYIYVAGFAWSWGPLGWLVPSEILPLKIRSAAQSVNVSVNMLCTFLVAQVFLNKLCHLKFGLFLFFGFFVMVMSFFIYFFLAETKGIPIEEMDWLTNDCTDNDENTTLHKLLQLHKLLRLRSPFFLLQDLRSQKQITGAGGFFGKNPPMLNGLGRGETIALLRDRAFFLNDKLLVGMRLCNVGPSSRKNTLRYSQPEAIPPPYDCELNGNRGGQASGSGENRSSDGTEIPGEKGGNEETIQSLGGDIHLPTRFVTPRRLFFFTLHVSGRHLFVYLTLSMFSDSWGLVSKLDDEPLVKVEIALVNAFNCQDLLSPTSLVESRLVDVVAGMDNKIPSAMSRKRAQVSGESSIAPFSQKKSNTGPSKTSAPALLNIVNKEASGVRTLHGNNCITE

SEQ ID NO: 23488 - protein, 518 aa, Glycine max; identical to SEQ ID NO: 638

SEQ ID NO: 23489 - protein, 519 aa, Glycine max
MPAVGGISNGGGKEYPGSLTPFVTVTCIVAAMGGLIFGYDIGISGGVTSMDPFLLKFFPSVFRKKNSDKTVNQYCQYDSQTLTMFTSSLYLAALLSSLVASTVTRRFGRKLSMLFGGLLFLVGALINGFAQHVWMLIVGRILLGFGIGFANQSVPLYLSEMAPYKYRGALNIGFQLSITVGILVANVLNYFFAKIHGGWGWRLSLGGAMVPALIITIGSLVLPDTPNSMIERGDREKAKAQLRRVRGIDDVEEEFNDLVAASESSRKVEHPWRNLLQRKYRPHLTMAVLIPFFQQLTGINVIMFYAPVLFSSIGFKDDSALMSAVITGVVNVVATCVSIYGVDKWGRRALFLEGGVQMVICQAVVAAAIGAKFGIDGNPGDLPKWYAVVVVLFICIYVSAFAWSWGPLGWLVPSEIFPLEIRSAAQSINVSVNMFFTFLIAQVFLTMLCHMKFGLFIFFAFFVLIMTFFIYFFLPETKGIPIEEMNQVWKAHPFWSRFVENDDYGNGVEMGRGTAIKEV

SEQ ID NO: 23490 - protein, 518 aa, Medicago truncatula
MAGGGIPIGGGNKEYPGNLTPFVTITCIVAAMGGLIFGYDIGISGGVTSMDPFLKKFFPAVYRKKNKDKSTNQYCQYDSQTLTMFTSSLYLAALLSSLVASTITRRFGRKLSMLFGGLLFLVGALINGFANHVWMLIVGRILLGFGIGFANQPVPLYLSEMAPYKYRGALNIGFQLSITIGILVANVLNYFFAKIKGGWGWRLSLGGAMVPALIITIGSLVLPDTPNSMIERGDRDGAKAQLKRIRGIEDVDEEFNDLVAASEASMQVENPWRNLLQRKYRPQLTMAVLIPFFQQFTGINVIMFYAPVLFNSIGFKDDASLMSAVITGVVNVVATCVSIYGVDKWGRRALFLEGGAQMLICQVAVAAAIGAKFGTSGNPGNLPEWYAIVVVLFICIYVAGFAWSWGPLGWLVPSEIFPLEIRSAAQSVNVSVNMLFTFLVAQVFLIMLCHMKFGLFLFFAFFVLVMSIYVFFLLPETKGIPIEEMDRVWKSHPFWSRFVEHGDHGNGVEMGKGAPKNV

SEQ ID NO: 23491 - protein, 82 aa, Phaseolus vulgaris
GFAWRWGPLGWLVPSEIFPLEIRSAAQSINVSVNMFFTFVIAQVFLTMLCHMKFGLFIFFAFFVVVMTFFIFFFLPETKGIP

SEQ ID NO: 23492 - protein, 516 aa, Vicia faba
MPAAGIPIGAGNKEYPGNLTPFVTITCVVAAMGGLIFGYDIGISGGVTSMNPFLEKFFPAVYRKKNAQHSKNQYCQYDSETLTLFTSSLYLAALLSSVVASTITRRFGRKLSMLFGGLLFLVGALINGLAQNVAMLIVGRILLGFGIGFANQSVPLYLSEMAPYKYRGALNIGFQLSITIGILVANILNYFFAKIKGGWGWRLSLGGAMVPALIITIGSLILPDTPNSMIERGDRDGAKAQLKRIRGVEDVDEEFNDLVAASETSMQVENPWRNLLQRKYRPQLTMAVLIPFFQQFTGINVIMFYAPVLFNSIGFKDDASLMSAVITGVVNVVATCVSIYGVDKWGRRALFLEGGVQMLICQVAVAVSIAAKFGTSGEPGDLPKWYAIVVVLFICIYVAGFAWSWGPLGWLVPSEIFPLEIRSAAQSVNVSVNMLFTFLVAQIFLTMLCHMKFGLFLFFAFFVVVMTIYIYTMLPETKGIPIEEMDRVWKSHPYWSRFVEHDDNGVEMAKGGVKNV

SEQ ID NO: 23493 - protein, 523 aa, Ricinus communis
MPAVGGIPPSGGNRKVYPGNLTLYVTVTCVVAAMGGLIFGYDIGISGGVTSMDSFLKKFFPSVYRKKKADESSNQYCQYDSQTLTMFTSSLYLAALIASLVASTITRKFGRKLSMLFGGVLFCAGAIINGAAKAVWMLILGRILLGFGIGFANQSVPLYLSEMAPYKYRGALNIGFQLSITIGILVANVLNYFFAKIKGGWGWRLSLGGAMVPALIITVGSLVLPDTPNSMIERGQHEEARAHLKRVRGVEDVDEEFTDLVHASEDSKKVEHPWRNLLQRKYRPHLSMAIAIPFFQQLTGINVIMFYAPVLFDTIGFGSDAALMSAVITGLVNVFATMVSIYGVDKWGRRFLFLEGGVQMLICQAIVAACIGAKFGVDGAPGDLPQWYAVVVVLFICIYVSGFAWSWGPLGWLVPSEIFPLEIRSAAQSVNVSVNMFFTFVVAQVFLIMLCHLKFGLFIFFSFFVLIMSIFVYYFLPETKGIPIEEMGQVWKQHWYWSRYVVDEDYPNGGLEMGKEGRIPKNV

SEQ ID NO: 23494 - protein, 513 aa, Oryza sativa (japonica cultivar-group)
MAGGAMTDTDGAHKNYPGKMTIFVFLACLVASSGGLIFGYDIGISGGVTSMDSFLIKFFPSVYAKEKEMVETNQYCKFDSELLTLFTSSLYLAALIASLFASVITRKFGRRITMLGGGVIFLVGAILNGAAADVAMLIIGRILLGIGVGFSNQAVPLYLSEMAPARMRGMLNISFQLMITVGILAANLINYFTDKIAGGWGWRVSLGLAAVPAVIMAGGSLFLPDTPNSLLSRGKENEARAMLRRIRGTDDVGPEYDDLVAASEASKAIENPWRTLLERRYRPQLVMSVLIPTLQQLTGINVVMFYAPVLFKTIGFGGTASLMSAVITGLVNMFATFVSIATVDRLGRRKLLLQGGVQMIFAQFILGTLIAVKFGTAGVANISRGYAIVVVLCICVFVSAFAWSWGPLGWLVPSEIFPLEIRSAAQSVVVVFNMAFTFIIAQIFLMMLCHLKFGLFYFFGAMELIMTGFVFFFLPETKGIPIEEMDRIWGKHWYWRRFVGAGAGGKVEITSTV

SEQ ID NO: 23495 - protein, 512 aa, Oryza sativa (japonica cultivar-group)
MENAGAGDGAPKHYPGKMTVFVFIACLVASSGGLIFGYDIGISGGVTSMDPFLSRFFPSVYAKEKEVVDTNQYCKFDSEPLTLFTSSLYLAALIASLFASVITRKLGRKMTMLGGGFIFLIGAVLNGAAVNVAMLIIGRILLGIGVGFSIQAVPLYLSEMAPAKMRGMLNIIFQLMITVGILFANLINYFTDKIAGGWGWRVSLGLAAVPAVIMTVGSILLPDTPNSLLSRGKENEARTMLRRIRGTEDIGPEYDDLVAASEATKAIENPWRTLLERRYRPQLVMSVLIPTLQQLTGINVVMFYAPVLFKTIGFGGTASLMSAVITGLVNMFATFVSIATVDRFGRRVLFIQGGIQMIIAQFILGTLIAVKFGTAGVANISQGYAIVVVLFICLFVSAFAWSWGPLGWLVPSEIFPLEIRSAAQSVVVVFNMAFTFFIAQIFLMMLCRLKFGLFFFFGAMELIMTGFVLVFLPETKGIPIEEMDRIWGEHWYWSRFVGAGRNRVMQMASTNV

SEQ ID NO: 23496 - protein, 152 aa, Apium graveolens
AIMFYAPVLFSTLGFKDNASLYSAVITGAVNVLSTVVSIYVVDKLGRRILLLEAGVQMFIAQIIIAIVLGIKVTDHSDNLGTAYAVIVVVMICTFVSAFAWSWGPLGWLIPSETFPLETRSAGRSVTVCVNLLFTFVIAQAFLSMLCHFKFG

SEQ ID NO: 23497 - protein, 523 aa, Nicotiana tabacum
MAGGGGIGPGNGKEYPGNLTLYVTVTCIVAAMGGLIFGYDIGISGGVTSMDSFLSRFFPSVFRKQKADDSTNQYCKFDSQTLTMFTSSLYLAALLSSLVASTVTRKLGRRLSMLCGGVLFCAGALINGFAQNVAMLIVGRILLGFGIGFANQSVPLYLSEMAPYKYRGALNLGFQLSITIGILVANVLNYFFAKIHWGWRLSLGGAMVPALIITIGSLFLPETPNSMIERGNHDEAKARLKRIRGIDDVDEEFNDLVVASEASRKIENPWRNLLQRKYRPHLTMAIMIPFFQQLTGINVIMFYAPVLFKTIGFGADASLMSAVITGGVNVLATVVSIYYVDKLGRRFLFLEGGIQMLICQIAVSICIAIKFGVNGTPGDLPKWYAIVVVIFICVYVAGFAWSWGPLGWLVPSEIFPLEIRSAAQSINVSVNMIFTFIVAQVFLTMLCHLKFGLFLFFAFFVVIMTVFIYFFLPETKNIPIEEMVIVWKEHWFWSKFMTEVDYPGTRNGTSVEMSKGSAGYKIV

SEQ ID NO: 23498 - protein, 510 aa, Petunia x hybrida
MAGGFAAGSGGGDYEGKVTTFGIMTCLVAATGGLLFGYDIGISGGVTSMDEFLLKFFPNVYHKEKALKAGGNQYCKFDDHLLQLFTSSLYLAALVASFAASITTKAFGRKISMLIGGLIFLVGAVLNGAAMNLAALIIGRLLLGVGIGYANQSVPVYLSEMAPPKLRGALNVCFQMAVTLGIFVANMVNYGTSSMKKNGWRVSLVLAAVPAIIMTVGAVFLPDTPNSLIDRGQKEKAKAMLQKIRGTNNVDNEFEDLIIASDMSKLVTDPWGNIMKPRYRPQLTIAVLIPFFQQLTGINVIMFYAPVLFKTLGFGDEAALMTAVITGLVNVFATLISIFTVDRFGRRFLFLAGGLLMLICQAAVGSVIGSVFGTDGLGTFSKGLGNVTVGLICLYVAAFAWSWGPLGWLVPSEVFPMEIRSAGQSITVSVNMFFTFVIGQLFLTMLCEMKFGLFFFFAGFVVLMTLFIFFFLPETKGIPIEEVNRIWKNHWFWKSYVPNDDDDHHSKNQV

SEQ ID NO: 23499 - protein, 205 aa, Olea europaea
SGGVTSMDDFLKKFFPAIYERKLHAKENNYCKYDDQLLQLFTSSLYLAALVASFGASKACNVLGRKPTIGLASILFILGAIASGIAPNKALLIIGRILFGFGVGFGNESVPLFLSEVAPMQHRGAVNILFQLFVTIGILIANLVNYAVSSIHPNGWRIALGLAGVPAIFLFIGSLIITETPSSLIERGKEFEGKEVLRKIRGVDD

SEQ ID NO: 23500 - protein, 464 aa, Dictyostelium discoideum
MKYLANISNKSWLIVTQSCLGGLVFGYATGIIVGTLDPIAIKFNTSTVIKGVIVCSILVGALIGSFAGGFAANKFGRKPLLLFTALTCICGAIGSGLGENVATICILRFIHGLGVGSSSSVCPLMVAEMVPIKRRGIFGSFFQISITVGILIANILAYVIKGNWRLMFCLGSIPGGLLFFVWFVIAESPVFLAKKSAKTTTTTNQESNENQIETQPQNNQGTKFTIIFSKKMRKPMLVGVLLATLAQLTGINAFMYFSNTIFKDAGINNPEIASVALQVWNVLTTLIAIFLVDKLGRRVLLFTGSIVMTTCDLLIALFFVVLTGSAKGWSSIVFLFIFVGAFEASIGTLFWFVINEILPEDSKSIGAPVINACQWTFNTILSFFFLVVVEYLGQSTMFWIFGGIGVFCTIFLYFNLPKSLGTSKNTTEDISIPQDQLEQTIEELENEKNNEINSSKLPPAQMQA

SEQ ID NO: 23501 - protein, 518 aa, Oryza sativa
MAGGAVVSTGAGKDYPGKLTLFVFFTCVVAATGGLIFGYDIGISGGVTSMDPFLRKFFPEVYRKKQMADKNNQYCKYDNQLLQTFTSSLYLAALVSSFFAATVTRVLGRKWSMFAGGLTFLIGAALNGAAENVAMLIVGRILLGVGVGFANQSVPVYLSEMAPARLRGMLNIGFQLMITIGILAAELINYGTAKIKAGWGWRVSLALAAVPAAIITLGSLFLPDTPNSLIDRGHPEAAERMLRRIRGSDVDVSEEYADLVAASEESKLVQHPWRNILRRKYRAQLTMAICIPFFQQLTGINVIMFYAPVLFDTLGFKSDASLMSAVITGLVNVFATLVSIFTVDRLGRRKLFLQGGAQMVVCQVVVGTLIAVKFGTSGIGDIPKGYAAVVVLFICMYVAGFAWSWGPLGWLVPSEIFPLEIRPAGQSINVSVNMLFTFVIAQAFLTMLCHMKFGLFYFFAGWVVIMTVFIALFLPETKNVPIEEMVLVWKSHWFWRRFIGDHDVHVGANHVSNNKLQP

SEQ ID NO: 23502 - protein, 518 aa, Oryza sativa; identical to SEQ ID NO: 23501

SEQ ID NO: 23503 - protein, 518 aa, Oryza sativa; identical to SEQ ID NO: 23501

SEQ ID NO: 23504 - protein, 518 aa, Oryza sativa; identical to SEQ ID NO: 23501

SEQ ID NO: 23505 - protein, 518 aa, Oryza sativa
MAGGAVVSTGAGKDYPGKLTLFVFFTCVVAATGGLIFGYDIGISGGVTSMDPFLRKFFPEVYRKKQMADKNNQYCKYDNQLLQTFTSSLYLAALVSSFFAATVTRVLGRKWSMFAGGLTFLIGAALNGAAENVAMLIVGRILLGVGVGFANQSVPVYLSEMAPARLRGMLNIGFQLMITIGILAAELINYGTAKIKAGWGWRVSLALAAVPAAIITLGSLFLPDTPNSLIDRGHPEAAERMLRRIRGSDVDVSEEYADLVAASEESKLVQHPWRNILRRKYRAQLTMAICIPFFQQLTGINVIMFYAPVLFDTLGFKSDASLMSAVITGLVNVFATLVSIFTVDRLGRRKLFLQGGAQMVVCQVVVGTLIAVKFGTSGIGDIPKGYAAVVVLFICMYVAGFAWSWGPLGWLVPSEIFPLEIRPAGQSINVSVNMLFTFVIAHAFLTMLCHMKFGLFYFFAGWVVIMTAFIALFLPETKNVPIEEMVLVWKSHWFWRRFIGDHDAHVGAHHVSSPKLQP

SEQ ID NO: 23506 - protein, 544 aa, Triticum aestivum
  unsure (1)..(544): unsure at all Xaa locations
MPGGGFAVSAPSGVEFEAKITPIVIISCIMAATGGLMFGYDVGISGGVTSMDDFLREFFPAVLRRXXNQDKESNYCKYDNQGLQLFTSSLYLAGLTATFFASYTTRRLGRRLTMLIAGVFFIIGVIFNGAAQNLAMLIIGRILLGCGVGFANQAVPLFLSEIAPTRIRGGLNILFQLNVTIGILFANLVNYGTSKIHPWGWRLSLSLAGIPAAMLTLGALFVTDTPNSLIERGHLEEGKAVLKRIRGTDNVEPEFNEIVEASRIAQEVKHPFRNLLQRRNRPQLVIAVLLQIFQQFTGINAIMFYAPVLFNTLXGFKSDASLYSAVITGAVNVLATLVSVYAVDRAGRRALLLEAGVQMFLSHAAIAGALGIKGTXDKPDNPGHGWAILGAAMVCTYGAXSFPWPGGPLGWLIPSETFPLETRSAGQSVTVCVNLLFTFLIAQAFLSMFCHLKFAIFILLSAWVLVMSVFVLFFLPETKNVPMEEMTDKVWKQHWLWKRFMDDDDQHHNIANGKNAXRMKSVAPTMXRCLPACTTRLRKRKDGY

SEQ ID NO: 23507 - protein, 201 aa, Triticum aestivum
  unsure (1)..(201): unsure at all Xaa locations
MAGGAVVNTSGGKDYPGRLTLFVFFTCVVAATGGLIFGYDIGISGGVTSMNPFLKKFFPEVYNKKQMKGSANQYCKYDNQLLQTFTSSLYLAGLVSSFFAATVTRVVGRKWSMFTGGLTFLIGAALNGAAENIAMLIVGRILLGVGVGFANQSVPVYLSEMAPARLRGMLNIGFQLMITIGILAAALINYXTNKIKAGYXW

SEQ ID NO: 23508 - protein, 212 aa, Triticum aestivum
  unsure (1)..(212): unsure at all Xaa locations
XXDDASLMSAVITGLVNVFATFVSIVTVDRLGRRKLFLQGGTQMLACQIVVGSLIGAKFGFTGVADIPKGYAAVXVVFFICAYVAGFAWSWGPLGWLVPSEIFPLEIRSAGQSITVSMNMLCTFIIAQAFLPMLCRFKFMLFFFFGAWVVVMTLFVAYFLPETKNVPIEEMVLXVWKAHWYWGRFIRDEDVHVGGADVEMRSNGKVQAAKLP

SEQ ID NO: 23509 - protein, 500 aa, Novosphingobium aromaticivorans
MRALRAGATVHVWRRPASRGTDTNPQREGEKGMSQQPQPGGNLGFIGLIVAVATIGGFMFGYDSGAINGTQDGLKHAFGLGEAELGLTVSALLPGCALGAFLAGRFADIWGRRAVMMMAAALFILSALGSGAAPSAIVLAVARFFAGAAVGAASVLSPAYISEVTPAHVRGRLSSAQQVMIISGLTGAFLANYWLAGAAGSSLGAFWCGYPAWRWMFWVQAAPAILFLVTLLLIPESPRFLVAKGRTEEARSVLARLFGDATADAKLGEIRASLAADHQPSLADIRKPGGGWRPIVWVGIGLAVFQQLVGINVVFYYGAVLWQAVGFSEADALKINILSGVVSIAACLVSIGLVDKLGRKPLLLIGSAGMTATLGALAWCFAQASTGPDGALVLPEGVGTIALYAANIYVVFFNMSWGPVMWVMLGEMFPNQMRGSALAVAGAAQWLANFAVSSSFPWLAGNIGLPVTYAAYTLFAAISLVFVWTSVKETKGKELEAMEG

SEQ ID NO: 23510 - protein, 557 aa, Schizosaccharomyces pombe
MDFNNIPLATIKSSDDKGKDFIVEMTTRPSETKKKVPFSEDMREIPSLPNEEEANATDPQANEVADENGEGFEAEKISSWIWVLSAVAGISGLLFGYDTGVISGALAVLGSDLGHVLSSGQKELITSATSFAALISATTSGWLADWVGRKRLLLCADAIFVIGSVIMAASRNVAMMVVGRFIVGYGIGLTSLIVPMYITELAPARLRGRLVIIYVVFITGGQLIAYSLNAAFEHVHQGWRIMFGIGAAPALGQLISLFWTPESPRYLLRHNHVEKVYKILSRIHPEAKPAEIAYKVSLIQEGVKVDFPEGNKFQHFFHSLKVLFTVPSNRRSLFIGCFLQWFQQFSGTNAIQYFSAIIFQSVGFKNSISVSIVVGATNFVFTIVAFMFIDRIGRRRILLCTSAVMIAGLALCAIAYHFLPADTTQNTNSGWQYVVLASIIIFLASYASGIGNIPWQQAELFPMEVRALGAGFSTAINWVGNLIISASFLTMMESITPTGTFALFAGFCFVGLVTSYFTYPELAGMSIENIHKLLEKGFWQAVKESTKRVRKGRIDEA

SEQ ID NO: 23511 - protein, 567 aa, Saccharomyces cerevisiae
MNSTPDLISPQKSSENSNADLPSNSSQVMNMPEEKGVQDDFQAEADQVLTNPNTGKGAYVTVSICCVMVAFGGFVFGWDTGTISGFVAQTDFLRRFGMKHKDGSYYLSKVRTGLIVSIFNIGCAIGGIILAKLGDMYGRKMGLIVVVVIYIIGIIIQIASINKWYQYFIGRIISGLGVGGIAVLSPMLISEVAPKEMRGTLVSCYQLMITLGIFLGYCTNFGTKNYSNSVQWRVPLGLCFAWALFMIGGMTFVPESPRYLVEAGQIDEARASLSKVNKVAPDHPFIQQELEVIEASVEEARAAGSASWGELFTGKPAMFKRTMMGIMIQSLQQLTGDNYFFYYGTTVFNAVGMSDSFETSIVFGVVNFFSTCCSLYTVDRFGRRNCLLYGAIGMVCCYVVYASVGVTRLWPNGEGNGSSKGAGNCMIVFACFYIFCFATTWAPIAYVVISETFPLRVKSKAMSIATAANWLWGFLIGFFTPFITGAINFYYGYVFMGCMVFAYFYVFFFVPETKGLTLEEVNDMYAEGVLPWKSASWVPTSQRGANYDADALMHDDQPFYKKMFGKK

SEQ ID NO: 23512 - protein, 564 aa, Saccharomyces cerevisiae
MSSAQSSIDSDGDVRDADIHVAPPVEKEWSDGFDDNEVINGDNVEPPKRGLIGYLVIYLLCYPISFGGFLPGWDSGITAGFINMDNFKMNFGSYKHSTGEYYLSNVRMGLLVAMFSIGCAIGGLIFARLADTLGRRLAIVIVVLVYMVGAIIQISSNHKWYQYFVGKIIYGLGAGGCSVLCPMLLSEIAPTDLRGGLVSLYQLNMTFGIFLGYCSVYGTRKYDNTAQWRVPLGLCFLWALIIIIGMLLVPESPRYLIECERHEEARASIAKINKVSPEDPWVLKQADEINAGVLAQRELGEASWKELFSVKTKVLQRLITGILVQTFLQLTGENYFFFYGTTIFKSVGLTDGFETSIVLGTVNFFSTIIAVMVVDKIGRRKCLLFGAAGMMACMVIFASIGVKCLYPHGQDGPSSKGAGNAMIVFTCFYIFCFATTWAPVAYIVVAESFPSKVKSRAMSISTACNWLWQFLIGFFTPFITGSIHFYYGYVFVGCLVAMFLYVFFFLPETIGLSLEEIQLLYEEGIKPWKSASWVPPSRRGISSEESKTEKKDWKKFLKFSKNSD

SEQ ID NO: 23513 - protein, 500 aa, Thermoplasma volcanium
MDIFHIFSDKRLNTVYLSKNMEYHEVIEKLDFSKVTRFYWLLTLLATIGGFLFGYDTSNIGTALVFIPYPVQGFIEGYLVAGASLGAAVGALIAAGLTDRYGRKYLLIADAAIYAAGAILSAFTIDLAMLLLSRTLIGLAVGADSGIATAYISEYAPKDRRGSLGILQQWMITIGILGAYIVGMATLYAAPGLASVLDWRIMLGVAAIPALIGLGFRFMMPESPRWLMINGKYKEASEAFKKLGLNLSVDELKEVKFRQRAKITNGVKRAFLVVALFFVFQQITGINIPFYYGPIVIEKLHLFGSATQSLVFTQIYAVAAATILAVINVAATYIGFRYIDTVGRRKLALLGYSGMTFFGLLGGLLLYLKFDVGLLIAFAGFIIFFAFGVGGTGWMIQGEYFPTNMRGLYASLGAFVDWIANFAIIEIFPVLEALITIKNVMFVFGILSLIAVLIFYYIMPETKELSVEQISDLFENNGLSSLRKASMSYNKSSSGSSGKK

SEQ ID NO: 23514 - protein, 480 aa, Thermoplasma volcanium
MEYHEVIEKLDFSKVTRFYWLLTLLATIGGFLFGYDTSNIGTALVFIPYPVQGFIEGYLVAGASLGAAVGALIAAGLTDRYGRKYLLIADAAIYAAGAILSAFTIDLAMLLLSRTLIGLAVGADSGIATAYISEYAPKDRRGSLGILQQWMITIGILGAYIVGMATLYAAPGLASVLDWRIMLGVAAIPALIGLGFRFMMPESPRWLMINGKYKEASEAFKKLGLNLSVDELKEVKFRQRAKITNGVKRAFLVVALFFVFQQITGINIPFYYGPIVIEKLHLFGSATQSLVFTQIYAVAAATILAVINVAATYIGFRYIDTVGRRKLALLGYSGMTFFGLLGGLLLYLKFDVGLLIAFAGFIIFFAFGVGGTGWMIQGEYFPTNMRGLYASLGAFVDWIANFAIIEIFPVLEALITIKNVMFVFGILSLIAVLIFYYIMPETKELSVEQISDLFENNGLSSLRKASMSYNKSSSGSSGKK

SEQ ID NO: 23515 - protein, 518 aa, Saccharum hybrid cultivar H65-7052
MAGGGMAALGVKTERAAQYKGRMTLAVAMTCLVAAVGGAIFGYDIGISGGVTSMDPFLEKFFPVVFHRKNSGGKNNYCKYDNQGLAAFTSSLYLAGLVASLVASPVTRNYGRKASIVCGGVSFLIGAALNVAAVNLAMLILGRIMLGVGIGFGNQAVPLYLSEMAPAHLRGGLNIMFQLATTLGIFTANLINYGTQNIKPWGWRLSLGLAAAPALLMTLAGLFLPETPNSLIERGRVEEGRRVLERIRGTADVDAEFTDMVEASELANTIEHPFRNILEPRNRPQLVMAVCMPAFQILTGINSILFYAPVLFQSMGFGGNASLYSSVLTGAVLFSSTLISIGTVDRLGRRKLLISGGIQMIVCQVIVAVILGAKFGADKQLSRSYSIAVVVVICLFVLAFGWSWGPLGWTVPSEIFPLETRSAGQSITVAVNLLFTFAIAQAFLSLLCAFKFGIFLFFAGWITVMTVFVCVFLPETKGVPIEEMVLLWRKHWFWKKVMPVDMPLEDGWGAAPASNNHK

SEQ ID NO: 23516 - protein, 287 aa, Saccharum hybrid cultivar H65-7052
IERGRVEEGRRVLERIRGTADVDAEFTDMVEASELANTIEHPFRNILEPRNRPQLVMAVCMPAFQILTGINSILFYAPVLFQSMGFGGNASLYSSVLTGAVLFSSTLISIGTVDRLGRRKLLISGGIQMIVCQVIVAVILGAKFGADKQLSRSYSIAVVVVICLFVLAFGWSWGPLGWTVPSEIFPLETRSAGQSITVAVNLLFTFAIAQAFLSLLCAFKFGIFLFFAGWITVMTVFVCVFLPETKGVPIEEMVLLWRKHWFWKKVMPADMPLEDGWGAAPASNNHK

SEQ ID NO: 23517 - protein, 530 aa, Aspergillus niger
MAEGFVDASRVEAPVTLKTYLMCAFAAFGGIFFGYDSGYISGVMGMRYFIEEFEGLDYNTTPTDSFVLPSWKKSLITSILSAGTFFGALIAGDLADWFGRRTTIVSGCVVFIVGVILQTASTSLGLLVAGRLVAGFGVGFVSAIIILYMSEIAPRKVRGAIVSGYQFCITIGLMLASCVDYGTENRLDSGSYRIPIGLQLAWALILGGGLLCLPESPRYFVKKGDLAKAAEVLARVRGQPQDSDYIKDELAEIVANHEYEMQVIPEGGYFVSWMNCFRGSIFSPNSNLRRTVLGTSLQMMQQWTGVNFVFYFGTTFFQSLGTIDDPFLISMITTIVNVCSTPVSFYTIEKFGRRSLLLWGALGMVICQFIVAIVGTVDGSNKHAVSAEISFICIYIFFFASTWGPGAWVVIGEIFPLPIRSRGVALSTASNWLWNCIIAVITPYMVDKDKGDLKAKVFFIWGSLCACAFVYTYFLIPETKGLTLEQVDKMMEETTPRTSAKWTPHGTFTAEMGLTANAVAEKATAVHQEV

SEQ ID NO: 23518 - protein, 583 aa, Neurospora crassa
MGGGGGSGAAGFYDAALQRREAVMGKSGPAALVKNFRVFSIACFACIGGVLYGYNQGMFSGVLAMPAFQKHMGEYDPIDENASQTKKGWLTAILELGAWLGTLLSGFMAEVLSRKYGVLVACLVFMLGVVIQATSISGGHETILAGRFITGMGVGSLAMIIPIYNSEVAPPEVRGALVALQQLAICFGIMVSFWIDYGTNYIGGTKLETQSDAAWLVPVCLQLAPALILFFGMMFMPFSPRWLIHHGREAEARKILSTLRGLPQDHELVELEFLEIKAQSLFEKRSIAELFPELREQTAWNTFKLQFVAIEKLFRTKAMFRRVIVATVTMFFQQWSGINAILYYAPQIFKQLGLSGNTTSLLATGVVGIVMFIATVPAVLWIDRVGRKPVLTIGALGMATCHIIIAVIVAKNVDQWETHKAAGWAAVAMVWLFVIHFGYSWGPCAWIIVAEIWPLSTRPYGVSLGASSNWMNNFIVGQVTPDMLKAIPYGTYIIFGLLTYMGAAFIWFFVPETKRLTLEEMDMIFGSEGTAQADNERMEEINAEIGLTRFLQGGSGANQGAADGSDTGYDAEKGKSEHYSQHV

SEQ ID NO: 23519 - protein, 539 aa, Neurospora crassa
MEHDHSASDIEKEAVTVARPQGDVTRVEAPVTLKAYMMCVFAAFGGIFFGYDSGYISGVMGMKYFIETINGPGATFLPSKEKSLITSILSAGTFFGALMGGDLADWVGRRPTIIFGCLVFIVGVVLQTASQSLGLIVAGRLVAGFGVGFVSAIIILYMSEIAPRKVRGAMVSGYQFCICLGLLLASCVDYGTQNRTDSGSYRIPIGLQMAWALILATGIFFLPESPRFFVKKGKLDKAAGVLSRLRDQPLDSDYVRDELAEIVANHEFEMTVVPYGNYFQQWANCFRGSIWQGGSYLRRTILGTSMQMMQQWTGINFIFYFGTTFFQQLGTIDNPFLMSLVTTLVNVCSTPISFYTMEKLGRRTLLIWGALGMLICEFIVAIVGTCRPDDTMAIKAMLAFICIYIFFFATTWGPASWVVIGEVFPLPIRAKGVALSTASNWLWNCIIAVITPYMVDEDKGNLGPKVFYIWGGLCTCCFIYAYLLVPETKGLTLEQVDQMLSESTPRTSTKWKPHTTYAAEMGMTEKTVAGHAENRSDSE

SEQ ID NO: 23520 - protein, 543 aa, Podospora anserina
MTLLSLKEDRPTPKAVYNWRVYTCAAVASFAACTIGYDSAFIGGTLALPSFEEEFDFASYSESGRALLKANIVSVYQAGAFFGSLFAYVTSHFGGRRISLFIFSVVFCIGAGIMLAANGDRGMAPIIAGRVLAGIGVGGCSNMVPIYISELSPPAVRGRLVGIYELGWQMGGLVGFWINYGVNTTLAPSHKQWIIPFAVQLIPAGLLLIGAFWLRESPRWLFANGKKEEGLKVLCWMRNLEPTDTYILEEVSYIEADLERFEREVGKGFWKPFLSLKQRKVQWRFFIGGILFLFQNGSGINAINYYSPTVFRSIGIDGVNTGLLTTGIFGVVKTVLTIIWLLWLVDLAGRRRMLFIGATGGSLCMWYIGAYIKLAKPEQSASGELTSAGISAVFFFYLWTAFYTPSWNGTPWVINSEMFDQNTRSLGQASAAANNWFWNFLISRFTPQMFLKMEYGVYFFFASLMILSIIFIFFFVPETKSIPLEAMDRLFEIKPVHRANKLLMAELQQTSDMGHGAEESVGKDSSSTDEKMRQAGFVQAENV

SEQ ID NO: 23521 - protein, 517 aa, Agaricus bisporus
GLIGGILSLRSFQEYLGINTKNAVKKAILDGNIISVLQAGCFFGALGTGYLSSRFGRRPCLIASGIVYITGGLLQCTVGLGPSQAAALHVFYIGRFISGIGVGMVSTLVPLYISECVPRTIRGRCTGTLQFATNSGLMLGFWVNYSVSKNVPFGEMQWRIPLIIQMIPSLLFIIAMFFQPESPRWLVEHGKHKEAATVLARTGGKDVDHPSVVQTLEEIKQEFVASKQPSFLKQIRLVGESRAVALRCFIPPLVMFFQQWTGTNAINLYSPEVFRHLGIHGTSGALFATGVYGVVKVVSVALALTFAVERFGRKRGLIFGGIGQALMMFWLGGYSATHQDGTVSPASHVSIVALYLYGAFFSMGWGPLPWVVAGEVAPNHVRSFALSIAVGTHWLFGFVISKVTPIMLDRIKYGTFLLFGFCCMIVATWAYFCLPETSGFALEDIKYLFERDVIIRSLQDAPGGKIFLGGRRVESVASLKERRVGVAGEQGEKITGLNSELEDVSSKKSTLKETSSV

SEQ ID NO: 23522 - protein, 473 aa, Zymomonas mobilis
MSSESSQGLVTRLALIAAIGGLLFGYDSAVIAAIGTPVDIHFIAPRHLSATAAASLSGMVVVAVLVGCVTGSLLSGWIGIRFGRRGGLLMSSICFVAAGFGAALTEKLFGTGGSALQIFCFFRFLAGLGIGVVSTLTPTYIAEIRPPDKRGQMVSGQQMAIVTGALTGYIFTWLLAHFGSIDWVNASGWCWSPASEGLIGIAFLLLLLTAPDTPHWLVMKGRHSEASKILARLEPQADPNLTIQKIKAGFDKAMDKSSAGLFAFGITVVFAGVSVAAFQQLVGINAVLYYAPQMFQNLGFGADTALLQTISIGVVNFIFTMIASRVVDRFGRKPLLIWGALGMAAMMAVLGCCFWFKVGGVLPLASVLLYIAVFGMSWGPVCWVVLSEMFPSSIKGAAMPIAVTGQWLANILVNFLFKVADGSPALNQTFNHGFSYLVFAALSILGGLIVARFVPETKGRSLDEIEEMWRSQK

SEQ ID NO: 23523 - protein, 526 aa, Candida albicans
MSANIQALMKSYVNFDEHTSGSAARGILIGMFAAFGGFLFGYDTGTISGVLSMDYVKARFPNNKTDFTSGESSLIVSILSVGTFVGSLIAPLFSDRIGRRWTLILSTLIVFNLGVLLQTVATEKKLLIAGRAIAGTGVGLISSVIPNYISETTPKWARGAVTASYQWMITWGLLIAACANKGSQGRKDSGSYRIPIGIQFLWALILGIGFLFLPETPRYWVSKSEETKAKDSLRRIRNLPVDHPDLVSEYDDIKANFDFESKYATSSWTQVFKNVNKQHHRLFTGVAIQALQQLTGINFIFYYGTQFFKRSGIEDPFLIQLATNIVNVGMTVPGIILVETWGRRPLLMAGSVVMAVSQLIVAIVGVAASSHAANQCLVAFSCIFIAGFAATWGPLCWAICGESFALNVRSKSISLCTASNWLWNFGIGYATPYMVDSGKGNADLGSKVFFIWGGCNVIGGLFAYFMVYETKSLTLEQVDELYLKVDHAWQSKGFVPSVHAFRDDGDIEHISSDGKAEMVEVDENSV

SEQ ID NO: 23524 - protein, 545 aa, Candida albicans
MSSKIERIFSGPALKINTYLDKLPKIYNVFFIASISTIAGMMFGFDISSMSAFIGAEHYMRYFNSPGSDIQGFITSSMALGSFFGSIASSFVSEPFGRRLSLLTCAFFWMVGAAIQSSVQNRAQLIIGRIISGIGVGFGSAVAPVYGAELAPRKIRGLIGGMFQFFVTLGIMIMFYLSFGLGHINGVASFRIAWGLQIVPGLCLFLGCFFIPESPRWLAKQGQWEAAEEIVAKIQAHGDRENPDVLIEISEIKDQLLLEESSKQIGYATLFTKKYIQRTFTAIFAQIWQQLTGMNVMMYYIVYIFQMAGYSGNSNLVASSIQYVINTCVTVPALYFIDKVGRRPLLIGGATMMMAFQFGLAGILGQYSIPWPDSGNDSVNIRIPEDNKSASKGAIACCYLFVASFAFTWGVGIWVYCAEIWGDNRVAQRGNAISTSANWILNFAIAMYTPTGFKNISWKTYIIYGVFCFAMATHVYFGFPETKGKRLEEIGQMWEERVPAWRSRSWQPTVPIASDAELARKMEVEHEEDKLMNEDSNSESRENQA

SEQ ID NO: 23525 - protein, 543 aa, Trichoderma harzianum
MAIGNIYVIAGVSVVGGALFGFDISSVSAQLAEQSYLCYFNQDENPPTTADGKCGGPRSLVQGGITASMAAGSWLGALISGPLSDRLGRKYSIMVGCIIWVIGSTLSCASQNIGMLIVARIINGISVGIESAQVPVYIAEISPPSKRGRFIGMQQWAITWGILIMYYISYGCSFIGEDNPVSYNTAAWRIPWGLQMIPAFFLFFMMMPLPESPRWLARKDRWEDCRAVLTLVHGKGDPNHPFVAYELQDIKDMCEFERQHADVTYLDLFKPRMINRTFIGLFTQIWSQLTGMNVMMYYIANIFSMAGYSGNANLLASSIQYIINVLMTIPALLWVDKWGRRPTLLIGSVLMALWMYANAGILATYGEVVPGGIDHVAAQSMRVTGAPAKGLIACTYRFVASFAPTWGPVSWTYPPELFPLRLRGKGVAMATSGNWAFNTALGLFTPVAFANIKWKSYLIFAVFNTVAFFHVFFVFPETAGKTLEETEAMFEDPNGIPYMGTPAWKTKVATSLTVRAEQGDLEAKIAHDTEKPPIHTHEEETTQ

SEQ ID NO: 23526 - protein, 522 aa, Uromyces viciae-fabae
MPAVMAGPVSFAPPEGKSSKVAIVIAVFAAFGGFLYGYDTGYIAGVKAMPFWLRSAGQRGPDGKYMITTSQDSMVTSILSVGTFVGALLAYPIGDRFGRRIGIMIACAIFSVGVALQTASTKIPMFVVGRVFAGLGVGVASCLVPMYQSECAPKWIRGGIVACYQWAITIGLLVASITVNATKDFDSANSYRIPIGIQFIWAAILTIGLLVLPESPRYLLLKGREDEAWKSLSRLYSAPYDDPDVQAEFSEIMASLEKERSFGKTTLLDCFKTDKRKNLQRTLTGLGVQGWQQASGINFFFYYGTTFFKNAGIENAFLVTVATNVVNVVMTIPGIWAVDKVGRRTMMICGAAMMFTCELILACVGTFTATSNLASQKVLVAFSCIFIGLFAATWGPIPWVVTSEIYPLATRGKQMAMSTASNWAVNFFIGFITPYLVDSGAGQAGLGVKVFWLWAALCFGAMVFSFLLIPETKGLSLEQVDLLYTNSTVLKSNTYRSQLIANNLHEGMTPAEKAYQEKLEHI

SEQ ID NO: 23527 - protein, 472 aa, Escherichia coli
  unsure (1)..(472): unsure at all Xaa locations
MVTINTESALTPRSLRDTRRMNMFVSVAAAVAGLLFGLDIGVIAGALPFITDHFVLTSRLQEWVVSSMMLGAAIGALFNGWLSFRLGRKYSLMAGAILFVLGSIGSAFATSVEMLIAARVVLGIAVGIASYTAPLYLSEMASENVRGKMISMYQLMVTLGIVLAFLSDTAFSYSGNWRAMLGVLALPAVLLIILVVFLPNSPRWLAEKGRHIEAEEVLRMLRDTSEKAREELNEIRESLKLKQGGWALFKINRNVRRAVFLGMLLQAMQQFTGMNIIMYYAPRIFKMAGFTTTEQQMIATLVVGLTFMFATFIAVFTVDKAGRKPALKIGFSVMALGTLVLGYCLMQFDNGTASSGLSWLSVGMTMMCIAGYAMSAAPVVWILCSEIQPLKCRDFGITCSTTTNWVSNMIIGATFLTLLDSIGAAGTFWLYTALNIAFVGITFWLIPETXNVTLEHIERKLMAGEKLRNIGV

SEQ ID NO: 23528 - protein, 547 aa, Leishmania donovani
MRASVMLCAALGGFLFGYDTGVINAALFQMKDHFGFSEHSWQYALIVAIAIAGAFVGAFISGFISAAFGRRPCIAVADALFVIGSVLMGAAPNVEVVLVSRVIVGLAIGISSATIPVYLAEVTSPKHRGATIVLNNLFLTGGQFVAAGFTAIMVVFTSKNIGWRVAIGIGALPAVVQAFCLLFFLPESPRWLLSKGHADRAKAVADKFEVDLCEFQEGDELPSVRIDYRPLMARDMRFRVVLSSGLQIIQQFSGINTIMYYSSVILYDAGFRDAIMPVVLSIPLAFMNALFTAVAIFTVDRFGRRRMLLISVFGCLVLLVVIAIIGFFIGTRISYSVGGGLFLALLAVFLALYAPGIGCIPWVIMGEIFPTHLRTSAASVATMANWGANVLVSQVFPILMGAIGVGGTFTIISGLMALGCIFVYFFAVETKGLTLEQIDNMFRKRAGLPPRFHEEGESGESGAGYREDGDLGRLATEDVCDLSSLGNRVVSFAKAEDAFTEVAMPDRHAVSNKFEERATSSSSDPQSLENQDEVRQAAIKAAPHEPK

SEQ ID NO: 23529 - protein, 543 aa, Trypanosoma vivax
MPEYPTEDTNASGKTSGSSPDDHTDDNAPSFFSCENLCIVQVPVSTGSLNGFSIGFVAVYMHLYEIFSGCSALESSGACSGNSKCTWIPNNSTCVWKDCNGAAGATTCKDGSGYNSLESGLFACSMIVGSMIGSIFAGKFLSKFGLKMSFIVSGVLGIVGSALIHVATRGSTLWVMCVGRFLMGLVLGLVCVASPMYVNENAHPKYRKTIGVLFQVFTTFGIMFAALLGLAIVKTPGHDKASGLLWRMQVFCSVSTALSALLLVLGLVVRKSKTSFAGGVDSAGEGVLDPNEYSVRQMLGPLAVGAVTAGTLQLTGINAVMNYAPEIMRNIGMDPMEGNSAVMSWNFVTALVAIPLVSRFTMRQLFLACSFMASCACLIMCGIPVYPGVASVDNRNIVATVGIAVFIAAFEFGVGSCFFVLAQDLFPRSFRPTGSSFVVMAQFIFNIMINLLYPITVEAISGGKGKSPEKGQSVSFIIFGIIGIICFVLQLRYLTPWEDGQGTSTSPTARCNAPTSPNNGEGEPATADMSPVEMSTPKHSGAA

SEQ ID NO: 23530 - protein, 543 aa, Trypanosoma vivax
MPEYPTEDTNASGKTSGSSPDDHTDDNAPSFFSCENLCIVQVPVSTGSLNGFSIGFVAVYMHLYEIFSGCSALESGGACSGNSKCTWIPNNSTCVWKDCNGAAGATTCKDGSDYNSLESGLFACSMIVGSMIGSIFAGKFLSKFGLKMSFIVSGVLGIVGSALIHVATRGSTLWVMCVGRFLMGLVLGLVCVASPMYVNENAHPKYRKTIGVLFQVFTTFGIMFAALLGLAIVKTPGHDKASGLLWRMQVFCSVSTALSALLLVLGLVVRKSKTSFAGGVDSAGEGVLDPNEYSVRQMLGPLAVGAVTAGTLQLTGINAVMNYAPEIMRNIGMDPMEGNSAVMSWNFVTALVAIPLVPRFTMRQLFLACSFMASCACLIMCGIPVYPGVASVDNRNIVATVGIAVFIAAFEFGVGSCFFVLAQDLFPRSFRPTGSSFVVMAQFIFNIMINLLYPITVEAISGGKGKSPEKGQSVSFIIFGIIGIICFVLQLRYLTPWEDGQGTSTSPTARCNAPTSPNNGEGEPATADMSPVEMSTPKHSGAA

SEQ ID NO: 23531 - protein, 568 aa, Toxoplasma gondii
MATEEMREKSLKREAESLWDIPPESYASKACSCMGTAAQLVMVAVLGSFQFGFNLSALNTSKAFIILDFGWCKDENGGHYSDCDTGLVYGSLINTAVFLGACVGCLLGGRLTDFGRRASLIFTHCVCTLGCILSAAAEGFPTLLIARLVVGVAVGMFTVCVPMYLSEVTPDDRRGYFGTFHQLFITLGIFFGTLLGLAFGNAPAGDEVYEVSTFQQAWWRVMLGLPAVVSLLAIWLLWFVFPFETPQYMVEKKQRAKATALLREIYGRDNVDVEIQRIVTSRYQQKIQRAQQLTVWKAIVHPTYRSVILLACLLSIMQQFTGINVLVANSNNLYSSLKLPQDAVTGLTVGFTALNVFLTVITIPLVDRLGRRTLLLFSEAVMFVAMGIAFVANLVDQSNTAVQWVTVACVYVFIVGFAVGYGPVLWIYIHEIFPPEIKQGAASLASALNWVATVAIVLPSDFLLKQGFSVFVGICTVALAIIFVVTFIFVKETKGLSIEESPYFKGKSRALGSPSAFRMELNSSPSVPLTRGEGAAASAEKGMGLTDAAAMNGGRGVSDDLTKGTEVV

SEQ ID NO: 23532 - protein, 500 aa, Plasmodium knowlesi
MKNSNEISSSQSLKNNGSDGFFNTSLMYVLAACLASFLFGYQVSVLNTIKDFIVIEFGWCAGKEVNCDDSTLKSSFLLASVFIGAVVGSGFSGFLVQHGRRFSLLVIYNFFILVSILTSITHHFHTILFSRLLSGFGIGLITVSVPMYISEMTHKDKKGAYGVLHQLFITFGIFIAVLLGMAMGNVPEEVNNPLGTFQQIWWRLMFFFPCIISILGIVLLTFFFKEETPYYLFEKGKVEESKEILKKIYGSDDVDEPLKAIKDAVEQNEAAKKNSISLMRAMKIPSYRYVILLGCILSGLQQFTGINVLVSNSNALYKGFLTNEWITTLSVIMTVVNFLMTFPAIYIVEKLGRKTLLLCGCAGIVCAFLPTAIANLINNTSDVVKKLSISATFVMIVSFAVSYGPVLWIYLHEMFPSEIKDSAASLASLVNWMCAIIVVFPSDIIIKQSPTILFFIFSGMSIVAFLFIFFFIKETKGGEIGTSPYITLEERQKHMGKSVV

SEQ ID NO: 23533 - protein, 502 aa, Plasmodium vivax
MKKSSKEISSSQSLKNGGSDHFFNTSLMYVLAACLASFIFGYQVSVLNTIKNFIVIEFGWCTGNKVECDDSTLKSSFLLASVFIGAVVGSGFSGYLVQHGRRFSLLVIYNFFILVSILTSITHHFHTILFSRLLSGFGIGLITVSVPMYISEMTHKDKKGAYGVLHQLFITFGIFVAVLLGMAMGEAPDAKSVDALGEFQKIWWRLMFFFPCLISILGIVLLTFFYKEETPYYLFENGKIEESKKILKKIYGTDNVDEPLKAIKDAVEQNEAAKKNSISLMRAMQIPSYRNVILLGCILSGLQQFTGINVLVSNSNELYKEFLSNKLITTLSVIMTVVNFLMTFPAIYIVEKLGRKTLLLCGCAGVICAFLPTAIANQIDSTSAFVKNLSIAATFVMIISFAVSYGPVLWIYLHEMFPSEIKDSAASLASLVNWVCAIIVVFPSDIIIKKSPTILFFIFSGMSILSFLFIFFFIKETKGGEIGTSPYITMEERQKHMGKSAV

SEQ ID NO: 23534 - protein, 498 aa, Plasmodium vivax
MKKSSKEISSSQSLKNGGSDHFFYTSFMYVLGRCLASFIFGSQVSVLNTIKNFIVIEFGWCTGNKVECDDSTLKSSFLLASVFIGAVVGSGFSGYLVQHGRRFSLLVIYNFFILVSILTSITHHFHTILFSRLLSGFGIGLITVSVPMYISEMTHKDKKGAYGVLHQLFITFGIFVAVLLGMAMGEAPDAQKAASLEEFQKIWWRLMFFFPCLISILGIVLLTFFYKEETPYYLFENGKIEESKKILKKIYGTDNVDEPLKAIKDAVEQNEAAKISLMRAMQIPSYRNVILLGCILSGLQQFTGINVLVSNSNELYKEFLSNKLITTLSVIMTVVNFLMTFPAIYIVEKLGRKTLLLCGCAGVICAFLPTAIANQIDRSSDFVRNLSIAATFVMIISFAVSYGPVLWIYLHEMFPSEIKDSAASLAFLVNWVCAIIVVFPSDIIIKKVPTICFSSSRHVHFVLPLIFFFIKETKGGEIGTSPYITMEERQKHMGKSAV

SEQ ID NO: 23535 - protein, 505 aa, Schistosoma mansoni
MGSGKKFTKSLSLSVLLACLGSSFTIGYNLGVLNLPGENIKEFLSRTMLGKNASEAENTANLVTPSFLYAQVSTAFVVAGAIGAFSCGAIADCLGRRNGLIVNSLLAIIGGILVGPCVAYSQPALLFVGRVFNGFNFGISMGIAPMYLTEIAPLSLRGGIGSLHQLALTIGILVSYLMTLTYTLNTPTLWPISVAVGSVPALIALILLPYCPESPRFLFIKKGKEAKARKAFQRLNCIDDINETFNEMKREMHEAEKRPKFKFFRLFTQRDLRMPVLIACIIQVFQQLSGINAVITYSSTMLKTAGIPLVYIQFCVVAVPAINVLMTVLSVYLIERAGRRTLLLWPTVLLAFSLLCLTISVNIASSTKDPTTARTAGIISAVLIILYICGFALGLGPIPGVIVAEIFRQEPRAAAYSLSQGVNLLCNLLVLFSYPSINDAIGGYSFLPFLVIVIICWIFFFLYMIETKNRTCDSNARDLATAKVVACQRPSRLTYKNEEPFYSDE

SEQ ID NO: 23536 - protein, 521 aa, Schistosoma mansoni
MGVASNNGITGKLVLTVLITCVGSSFLIGYNLGVLNLPRRNIEIYFNETVVPNTPELDSSFFYTHVSTIFVVAAAIGAFSCGWVADGLGRRNGLILNNVIGIIGGVIVGPCVLVKQPALLYVGRFVIGINSGITIGIASLYLTEVAPRDLRGGIGACHQLAVTVGIAFSYFITFTFLLNTLNLWPLAVALGAVPAAISLVTLPFCPESPRFLYMKKHKEAEARKAFLQLNVKENVDTFIGELREEIEVAKNQPVFKFTQLFTQRDLRMPVLIACLIQVLQQLSGINAVITYSSLMLELAGIPDVYLQYCVFAIGVLNVIVTVVSLPLIERAGRRTLLLWPTVSLALSLLLLTIFVNLADSGPQSTKNAMGIISIILILIYICSFALGLGPVPALIVSEIFRQGPRAAAYSLSQSIQWLSNLIVLCSYPVIQKNIGGYSFLPFLVVVVICWIFFFLFMPETKNRTFDEVARDLAFGNIVVGKRTTALEDRNLTVFTKQGNNEGPASESLLYPRSDNDKGMYA

SEQ ID NO: 23537 - protein, 500 aa, Taenia solium
MVNFHYVFATVVIVFGSSFQFGFQTGVINSPLPLIEKYILSICEDRGSSPSPEFVQAMSSLVVAGFPIGGIFGALFGGSVSNKMGRKLSLFIFNIPMAVGSLLMMACQAAVSFEMIIVGRVLVGFACGAFTGIAPVYLAEIAPVRIRGMSGIMHQLAIVCAILISQILGLKELMGSAKLWPYLLGLTIIPSVVLLFLFWICPDSPRYILLNSQDLESAKSALFWLRGDTEVVEEEIGELLAEQENESENHTKFPLKDLFRVKALRLALFVAVVAHLAQQFSGINAALFYSTSLFESIGLTSQAVYATLGVGSMIVVITVASIFLIERVGRRILLIGGLSVMLFSAVIITIGLALRSHASGLVYLAITFVYIFVGGFAIGPGSIPWFVVAEMFVQETRDPAIVITVIVNWLAQIVISLGYPPLLKYLKDYSFMPFIGLLVIFIALLYFFLPETKGRAPCDVQDEFVRMTGGAEDDVTLGSYTRSLPSENGENMTKSDRVKF

SEQ ID NO: 23538 - protein, 510 aa, Taenia solium
MKGISGPLVLAIFTTCFGSSFLLGYNLGVANLPGDNIKKFLVNYYKPDNSSALNANFLYGQVTSVLVICAAIAAFTCGWVADGLGRKRSLMVNNGIGIVGSVISSVCVVANQPALLYVGRAISGLNSGLSIGIAAMFLTEIAPRHLRGMIGACNQLAITIGIVISYVLTLSHLLNTPTLWPVAMGVGAIPAVIALIISPFTVESPRWLYLKKKDEKAAREAFARINGSENVDMFIAEMREELEVAQNQPEFKFTELFRRRDLRMPVIIAVLIQVMQQLSGINAVVANSSEMLKSAKVSPDMLEYFVVGLGLLNVICTIVALPLLEKAGRRTLLLWPSLVVAIILLLLVIFVNIANYGGVVNKTPFVLVSAVLVFIYVAAFAMGLGPMPALIVAEIFRQGPRAAAYSLSQSIQWACNLIVVASFPSLNELLKGYVYLPYLVVVAVCWVVFFLFMPETKNRTFDEVARDLAFGSIVVGKRTAALQAPVFTKEDEEAATALRRSDEEDAKVDA

SEQ ID NO: 23539 - protein, 492 aa, Caenorhabditis elegans
MGVNDHDVSVPLQEVQSRTVEGKLTKCLAFSAFVITLASFQFGYHIGCVNAPGGLITEWIIGSHKDLFDKELSRENADLAWSVAVSVFAVGGMIGGLSSGWLADKVGRRGALFYNNLLALAAAALMGLAKSVGAYPMVILGRLIIGLNCGFSSALVPMFLTEISPNNLRGMLGSLHQLLVTIAILVSQIFGLPHLLGTGDRWPLIFAFTVVPAVLQLALLMLCPESPKYTMAVRGQRNEAESALKKLRDTEDVSTEIEAMQEEATAAGVQEKPKMGDMFKGALLWPMSIAIMMMLAQQLSGINVAMFYSTVIFRGAGLTGNEPFYATIGMGAVNVIMTLISVWLVDHPKFGRRSLLLAGLTGMFVSTLLLVGALTIQNSGGDKWASYSAIGFVLLFVISFATGPGAIPWFFVSEIFDSSARGNANSIAVMVNWAANLLVGLTFLPINNLMQQYSFFIFSGFLAFFIFYTWKFVPETKGKSIEQIQAEFEKRK

SEQ ID NO: 23540 - protein, 510 aa, Caenorhabditis elegans
MSEKSRSDTSATASLSDSSKSPSSYSTPGTTTQKIIFPDGKLTKCLAFSAFVITLASFQFGYHIGCVNAPGGLITEWIIGSHKDLFDKELSRENADLAWSVAVSVFAVGGMIGGLSSGWLADKVGRRGALFYNNLLALAAAALMGLAKSVGAYPMVILGRLIIGLNCGFSSALVPMFLTEISPNNLRGMLGSLHQLLVTIAILVSQIFGLPHLLGTGDRWPLIFAFTVVPAVLQLALLMLCPESPKYTMAVRGQRNEAESALKKLRDTEDVSTEIEAMQEEATAAGVQEKPKMGDMFKGALLWPMSIAIMMMLAQQLSGINVAMFYSTVIFRGAGLTGNEPFYATIGMGAVNVIMTLISVWLVDHPKFGRRSLLLAGLTGMFVSTLLLVGALTIQNSGGDKWASYSAIGFVLLFVISFATGPGAIPWFFVSEIFDSSARGNANSIAVMVNWAANLLVGLTFLPINNLMQQYSFFIFSGFLAFFIFYTWKFVPETKGKSIEQIQAEFEKRK

SEQ ID NO: 23541 - protein, 466 aa, Nostoc punctiforme
MSSTTVRRKSNTFYVILIAGAAALGGFLFGFDTAVINGAVLSLAKAFNTSSWVTGLAVSLALLGSAVGAFFAGQIADRYGRVKAMVVASVLFTISAIGSGMAFTIWDFIFWRVLGGIGIGVASVIAPAYIAECSPTHLRGRLGSLQQLAIVVGIFVALLSDYFIATSAGSADSPFLFGVAAWRWMFWTAVPPAVFYGMVALTIPESPRYLVAKGRESEAVNVLTKILGGDVLPKIEEIRQTVLRERQPKFSDLLSRSGGLLPIVWIGIGLSVLQQFVGINVIFYYSSVLWRAVGFSEKDSLSITVITGAVNIITTLIAIAFVDKFGRKPLLIIGSIGMTLTLGTMAYIFGNAPLDAAGNPSLAGSAGTVALIAANLYVFCFGFSWGPIVWVLLGEMFNNKIRAAALSVAAAIQWVANFLISTTFPPILQYFGLGSAYGLYTIAAATSFFFILFFIKETKGIELEDM

SEQ ID NO: 23542 - protein, 481 aa, Drosophila melanogaster
MAFLCAPGLTFFLTYSIFSAVLGMLQFGYNTGVINAPEKNIENFMKDVYKDRYGEDISEEFIQQLYSVAVSIFAIGGMLGGFSGGWMANRFGRKGGLLLNNVLGIAGACLMGFTKVSHSYEMLFLGRFIIGVNCGLNTSLVPMYISEIAPLNLRGGLGTVNQLAVTVGLLLSQVLGIEQILGTNEGWPILLGLAICPAILQLILLPVCPESPRYLLITKQWEEEARKALRRLRASGSVEEDIEEMRAEERAQQSESHISTMELICSPTLRPPLIIGIVMQLSQQFSGINAVFYYSTSLFMSSGLTEESAKFATIGIGAIMVVMTLVSIPLMDRTGRRTLHLYGLGGMFIFSIFITISFLIKEMIDWMSYLSVVATLGFVVFFAVGPGSIPWMITAELFSQGPRPSAMAIAVLVNWMANFVVGIGFPSMKTALENYTFLPFSVFLAIFWIFTYKKVPETKNKTFEEILALFRHNNGRYVSLH

SEQ ID NO: 23543 - protein, 505 aa, Plasmodium yoelii yoelii
MNILRMDILSRGGTQEIEHRDGFFNTSFQYVLSACLASFIFGYQVSVLNTIKSYIVVEFEWCSTKTDTSCEDSILKSSFLLASVFIGAVLGSGFSGYLVKFGRRFSLMVIYIFFIFVSILTAISHHFHTILYARLLSGFGIGLITVSVPMYISEMTHKDKKGAYGVLHQLFITFGIFVAVLLGLFLGDGPKINGKSIELSNFEMFWWRFMFFLPTIISLLGIILLIAFYKEETPYFLYENGNIEGSKNILKKIYGPSDVDDALRAIKDAIDQNKAAKESSLSLLSALKIPAYRNVIILGCILSGFQQFTGINVLVANSNELYKEFLDKNLITILSVIMTAVNFLMTFPAIYIIEKIGRKTLLLGGCIGVICAFLPTVIARQVWGPTKIVNGLSIAGTFLMIISFAVSYGPVLWIYLHEMYPSEIKDSAASLASLINWVCAIIVVFPSDIIIKKSPSILFMFFSVMCIIAFLFIMFFIKETKGGEIGTSPYISLEERQKHIGKSKV

SEQ ID NO: 23544 - protein, 553 aa, Halocynthia roretzi
MGKENLVENGSGQYSEKPKATFSLIMGVAMAVIGSSFQYGYNIAVVNAPADEIKDFFFGPYKTVVIINSTTPAYNYTTAMTSLNSTQFPFTEAVIKTETIVVDEDLRVYRDNMYAIAVSAFAASGMVGSILVGPVVKRFGRCGGLMVNNCISLIAAVFLGFSKLANSFIMIIIGRVFIGIFAGLATGIVPMYIGEISPKEWRGAIGVLNQLLITIGILVAQLLGLQGALGTPDLWPILLGFTAIPSIIQIIARPFMPKSPRYLLIDQHKSDEARNTLVKLRGTDNIASEMDEMQNEADSEISVGQMSIAQLFKDHTVRWQLIIVLSIMVAQQLSGINAVFFYTNEIFESAKIPAGNQQDLASVGVGVVNVLMTIVSVGVIEWAGRKSLLVWGFGMMIFWCIAMTVVLNLLQTITVAWISYLSIACVIGYIVGFAIGPGPVPWLVTAELFRQAARPPAFMIACLLNWTCNFLIGIGFPAVNKATGPYVFLIFMVVCIAITVFLSLVMPETKGKTFQEINNLFAKRNGVRESSTNNDKSMRIPLKDFGNEAGDRV

SEQ ID NO: 23545 - protein, 489 aa, Eptatretus stoutii
MDSKEKQLTFRLAFAVTVAALGSLLFGFNIGVMNAPEQIIKDFFNETWMGRSGVEIEKATLLTLWSFTVAIFTVGGMVGSLSVGLFVNRFGRRNPMCLNNLLAVLGGAFMAMSKDASSYETLILGRFVIGLYCGLATGFVPMYLGEISPTNLRGAVGTIHQLAIVFGILISQVLGLNFIFGSENRWPILLGLAIIPAVVQALALPFCPKSPRFLLINQTKEKEAKDVLKQLRGVEDVGTEMLEMKEEHRRMTQEPKVSILQLFRHPNYRQAIIISIVLQLSQQLSGINAVFYYSTGIFSKAGVDQAEYATIGAGVVNAAFTIVSLFLVERLGRRLLHLVGLGGMAVCTVIMTLSLHFMTKAPAVSYLAIIAFFGFVAFFEIGPGPIPWFIVAELFSQGPRPAAVAVAGCSNWTSNFLVAMLFPFAQELMGPFVFLIFTVLLIFFTIFTYFRVPETKGRTFDDIASEFRVKAGMKPEAAENIQLNTDSSV

SEQ ID NO: 23546 - protein, 533 aa, Ctenopharyngodon idella
MEKMKDSKMKQVTHYLVFCVSTAVIGSLQFGFNTGVINAPDKKVQNFIRNVTLERTGETMKDTTLTNVWGIAVSIFNVGGMVGSLSVGALVDKLGRRKSMLLSNILALIGGSLMGLSKVSASYELMIVGRLVIGVFCGLCTGLTPMYVGEISPTALRGAFGTLHQLGVVIGILVAQILGLESLLGSQSLWPLLLALTILPAVLQSVMLIFCPESPRYLLISVNQEDEARKVLTRLRGHSDVEDDIREMKEEAMKMSMEKKVSIPELFRNSAYRQPIIIAIILQLSQQLSGINAVIYYSTEIFRKAGITEPVIATIGMGAVNTLFTVVSLFLVERAGRRTLHMIGLAGMTFCVLVMTISLKLVNPADPVQNSTVIAKTASEAGISAVSVVAILAVLGFVASFEMGPGPIPWFIVAELFAQGPRPAAIAVAGCCNWTASFIVGLSFPPLLELCGPYVFIIFLILLIIFFLFTYFRVPETKGRTFEDIASGFSNVAGSNAANYTSPEGAVTMPVSPSSDKIQMTELAGQEKSGTNL

SEQ ID NO: 23547 - protein, 478 aa, Cyprinus carpio
MLAVGTAVIGSLQFGYNTGVINAPQNVIEKFYNETWLDRYQEIIPKTTMTTLWSLSVAIFSVGGIVGSFSVGLFVNRFGRRNSMLMANVLAFISAALMGFSKNAASWEMLIIGRFVVGLYSGLATGFVPMYVGEVSPTALRGALGTLHQLGIVVGILMAQIFGMDVIMGNDTMWPFLLCFTFIPAVLQCCLLPFCPESPRFLLIIRNEENKAKSVLKKLRGTSDVAADMQEMKEESRQMMREKKVTIPELFRSPLYRQPMIICIMLQLSQQLSGINAVFYYSTKIFQKPGVEQPVYATIGAGVVNTAFTVVSLFVVERAGRRSLHFLGLLGMAGSAVLMTIALALLENVPWMSYISIVAIFGFVAFFEIGPGPIPWFIVAELFSQGPRLRLSVAGLCNWTANFIVGMCFQYVEELCGPYVFIIFTIFLLGFFVFTYFKVPETKGRTFDEISAGFRQAASAAEKHSPEELNSLGADSQL

SEQ ID NO: 23548 - protein, 505 aa, Oncorhynchus kisutch
MPSGFQQLGGETVTGTLALSVFTAVLGSFQFGYNIGVINAPQKIIEADYNATWVHRYGEPIPSSTLTTLWSLSVAIFSIGGMISSFCVGVISEWLGRRKAMLINNLFAFIGGGLMGMAKISRSFEMMILGRFVIGAYCGLASGLVPMYVGEIAPTSLRGALGTLHQLAIVTGILMAQVLGLESLLGSEELWPVLVGVTVLPTVLQMVLLPFCPESPRFLYIIRSQEHHAKSGLRRLTGRQEVGDMLAEMKEEKRRMDMERKVSIAELFRSPMYRQPIIIAILLQLSQQLSGVNAIFYYSTSIFQKAGVQSPVYATIGAGVVNCAFTVVSLFLVERTGRRTLHMLGLSGMCGCAIVMTMALALLDSVPWMSYISMLAIFGFVAFFEVGPGPIPWFFVAELFSQGPRPAAMAVAGFANWTANFIIGFGFQYVAELCGPYVFLIFAALLLFFLIFTFFRVPETRGKTFDQISNTFSKHSPAMIDMDLDMELGKHSTELDYLGEEGSLN

SEQ ID NO: 23549 - protein, 492 aa, Oncorhynchus mykiss
MDSGGKQVTFQLMLTVGAAVIGSLQFGYNTGVINAPQKVIERFLNETWFDRYQEPISKTSLTTLWSVSVAIFSVGGIFGSFSVGLFVNRFGRRNSMLMANVLAFVSAALMGFSKMGGSWEMLIIGRFVVGLYSGLSTGFVPMYVGEVAPTALRGALGTLHQLGIVTGILMAQVFGMEALMGNASLWPFLLGFTFIPALAQCALLPFCPESPGFLLINRNEENKAKTVLKKLRGTTDVSADMQEMKEEARQMMREKKVTILELFRSPLYRQPIFIAIMLQLSQQLSGINAVFYYSTRIFEKAGVAQPVYATIGAGVVNTAFTVVSLFVVERAGRRSLHLLGLIGMAGAAVLMTIALALLDKLPWMSYVSIVAIFAFVAFFEIGPGPIPWFIVAELFSQGPPPSAFAVAGFSNWTANFIVGMAFQYVEELCGPYVFVIFTILLLSFFIFTYFKVPETKGRTFDEISAGFRQSSGTGGEKHSPEELNSLGADSQL

SEQ ID NO: 23550 - protein, 482 aa, Oncorhynchus mykiss
  unsure (1)..(482): unsure at all Xaa locations
MESGKQLTGTLTLAVFSAVLGSLQYGYSLGVINAPQKVIEQHYGRSLGVLPEEPLLLSENGTGTEKQEVHPSVVMYWSLSVSIFSIGGVVSSFLVGFVGDLRGRVKGMLMVNVLAVIAGLLMVMAKMWKPHVMVIAGRCVMGFYCGLSSGLVPMYIGEIAPMAYRGALGTLHQLATVTGILLSQVLGLEFLLGNDYYWPLLLGLSGAPAVLQSLLLPLCPESPRXLYIKRGMXEEAKNSLRRLKGEYDPSADLEEMRREKEEVEKEAQVSIAVLVRSSLYRQQLFVALMMHLSQQLSGINAIFYYSTAIFERAGVTQPVYATIGVGVLNTVFTMVSVALVDRAGRRTLTLIGLGGMCICAIAMTVGLVYLRVYSWMSYVSMSAIFLFVCFFEIGPGPIPWFIVAELFSQGPQAAAIALAGCTNWTSNFIIGMTFPYIEALCGSYVFILFAVLLFGFTVFTYLRVPETKGKTFEEIAAVFKRE

SEQ ID NO: 23551 - protein, 503 aa, Salmo trutta
MPPGFQHLGGETVTGTLALSVFTAVLGSFQFGYNIGVINAPQKIIEADYNATWVHRYGELIPTATLTTPWSLSVAIFSIGGMISSFCVGVISEWLGRRKAMLINNLFAFIGGSLMGMAKISRSFEMMILGRFVIGAYCGLASGLVPMYVGEIAPTSLRGALGTLHQLAIVTGILIAQVLGLESLLGSEELWPVLVGVTVLPTVLQMALLPFCPESPRFLYIIRCQEHHAKSGLRRLTGRQEVGDMLAEMKEEKRRMDMERKVSIAELFRSPMYRQPIIIAILLQLSQQLSGVNAVFYYSTSIFQKAGVQSPVYATIGAGVVNSAFTVVSLFLVERTGRRTLHMLGLFGMCGCAIVMTIALALLDSVPWMSYISMLAIFGFVAFFEVGPGPIPWFFVAELFSQGPRPAAMAVAGFSNWTANFIIGFGFQYLAELCGPYVFLIFAVLLLFFLIFTFFRVPETRGKTFDQISTSFSQHPPAMMDLDMELGKRSTELDYLGGEGSLD

SEQ ID NO: 23552 - protein, 162 aa, Capsella rubella
AAPVYLSEVAPPRWRGAFNSGFQFFIGVGVVAANLINYGTDSHRNGWRISLGLAAVPAAIMTVGCLFISDTPSSLLARGKHENAHASLLKLRGVENIADVETELAALARSSQLAIEARAEPFAKTILERRYRPHLVVAVAIPCFQQLTGITVNAFYAPVLFR

SEQ ID NO: 23553 - protein, 500 aa, Mycobacterium tuberculosis CDC1551
MTTLWQPHRNDYSPIPGRGVHARRGARRPRPRGGRAERPGTGQLTRSGRRALLVGLTAASVGVLYGYDLSAIAGALLSLSEEFELTTREQELLTTTAVLGQIAGALGGGILANAIGRKKSVVLIVAGYAVFALLGATSVSVPMLVVARLLLGVTIGLSVVVVPVYVAESAPAAVRGSLVTAYQLATLSGIVVGYLVGYLLAGSHGWRAMFGLAAAPATLLLPLLWRMPIPPAGICSRAGSPTRVAAADPAGRDIDAELADMAAAVDERGGGIGEMVRRPYLRATLFVIALGFLVQITGINAIIYYSPRLFAAMGFAGYFAMLALPAMVQVAGLAAVCASLFLVDRLGRRPILLSGIATMITADAVLITVFANDSDGGTGLVLGFAGVLLFIIGFNFGFGSLVWVYAAESFPSRLRSMGSSLMLTSTLTANAIVAAFSLTMLRVLGGAGVFAVFGTFAVVAFVVVYRFAPETKGRKLEEIRHFWENGGRWPAERSPAADEP

SEQ ID NO: 23554 - protein, 493 aa, Xenopus laevis
MESRKGQVTCSLVFSVCVAAIGSLQFGYNTGVINAPEKIIRSFYNATYEHRYGKIIPESLLTSLWSLSVAIFSVGGMMGSLSVGLFANRFGRRNSMLLVNVAAIVGGAFMGFSKLAWSPEMLIIGRFIIGIFCGLCTGLVPMYIGELAPTSLRGALGTLNQLGIVIGILVAQIFGLDFILGSETLWPLLLAFTIFLSIIQCALLPFCPESPRYLLITKGEDEKAEMILRKLRGTTDVASDVQEMKDESARMAQEKSVSIIEIFRSSQYRQPITIAIILQLSQQLSGINAVFYYSTSIFEDANVPNPVYATIGAGVVNTVFTIVSLLIVERAGRRTLHLTGLGGMAVGALIMTIALKLKDQDQAWSYVSIVAIYGFVALFEIGPGPIPWFIVAELFSQGPRPAAMAISGCSNWTANFLVGMLFPYAAIACGPYVFLIFMVLLILFFIYTFFKVPETRGRTFEDISQEFQKKGAESRTKSDSVELTGIQGLDKKV

SEQ ID NO: 23555 - protein, 621 aa, Macaca fascicularis
MVPVENTEGPNLLNQKGTAVETEGSYRASGSRHPPWARGCGMFTFLSSVTAAVSGLLVGYELGIISGALLQIKTLLTLSCHEQEMVVSSLLIGALLASLTGGVLIDRYGRRTAIILSSCLLGLGSLVLILSLSYTVLIVGRIAIGVSISLSSIATCVYIAEIAPQHRRGLLVSLNELMIVIGILSAYISNYAFANVFHGWKYMFGLVIPLGILQAIAMYFLPPSPRFLVMKGQEGAASKVLGRLRALSDATEELTVIKSSLKDEYQYSFWDLFRSKDNMRTRIMIGLTLVFFVQITGQPNILFYASTVLKSVGFQSNEAASLASTGVGVVKVISTIPATLLVDHVGSKTFLCIGSSVMAASLVTMGIVNLNIHMNFTNICRSHNSINQSLDESVIYGPGNLSASNNTLRDHFKGIASHSRSSLMPLRNDVDKRGETTSASLLNAVLSHTEYQIVTDPGDVPAFLKWLSLASLLVYVAAFSIGLGPMPWLVLSEIFPGGIRGRAMALTSSMNWGINLLISLTFLTVTDLIGLPWVCFIYTIMSLASLLFVVMFIPETKGCSLEQISMELAKVNYVKNNICFMSHHQEELVPRQPQKRKPQEQLLECNKLCGRGQSRQLSPEN

SEQ ID NO: 23556 - protein, 495 aa, Canis familiaris
MGTQKVTVSLIFALSIATIGSFQFGYNTGVINAPETIIKDFLNYTLEEKSENLPTEVLLTSLWSLSVAIFSVGGMIGSFSVGLFVNRFGRRNSMLMVNLLAVAGGCLMGFCKIAQSVEMLILGRLIIGLFCGLCTGFVPMYIGEISPTALRGAFGTLNQLGIVIGILVAQIFGLKVIMGTEELWPLLLGFTIIPAVLQSAALPFCPESPRFLLINRKEEENAKEILQRLWGTQDVSQDIQEMKDESARMAQEKQVTVLELFRSRSYRQPIIISIMLQLSQQLSGINAVFYYSTGIFKDAGVEEPIYATIGAGVVNTIFTVVSLFLVERAGRRTLHMIGLGGMAVCSILMTISLLLKDNYNWMSFVCIGAILVFVAFFEIGPGPIPWFIVAELFSQGPRPAAMAVAGCSNWTSNFLVGLLFPSAAFYLGAYVFIIFTGFLIVFLVFTFFKVPETRGRTFEEITRAFEGQGQDANRAEKGPIVEMNSMQPVKETATV

SEQ ID NO: 23557 - protein, 395 aa, Ferroplasma acidarmanus
MKVSQYYTKKLSKFWGNRSLLLSRTLIGLAVGADSAIATAYIAEYAPKNRRGHLSLMQQWMITWGILGAYFVGMGVFFIAPQLAYTIDWRVLLGVAAIPSLIGLVFRFYMPESPRWLILHEKYDKAIASLKRFNVTAKLSEIKNTHDYLVAKETKQKATPGIKRAFVIVGLFMMFQQITGINIPFYYGPVVIAKLHIFGSTGGTAISSAVFGIEASSILAIINVLATLIGFRLIDSYGRRSLALLGYSGMAFFDVLGAVLYLSHIDIGLLIGFAGFIIFFAFGVGGTGWIIQGEYFPTQYRGLFASLIAVVDWISNFAIIELFPVMDLKIGLGYTMAVFAVLSIMAVVIFFYIMPKTKGKSVEEINDIFENNTLATVRNASMSGYSDNSKTDKKQ

SEQ ID NO: 23558 - protein, 509 aa, Equus caballus
  unsure (1)..(509): unsure at all Xaa locations
MPSGFQQIGSEDGEPPQQRVTGTLVLAVFSAVLGSLQFGYNIGVINAPQKVIEQSYNETWLGRQGPEGPSSIPPGTLTTLWALSVAIFSVGGMISSFLIGIISQWLGRKRAMLVNNALAVLGGSLMGLADTAASYEMLILGRFLIGAYSGLTSGLVPMYVGEIAPTHLRGALGTLNQLAIVIGILIAQVLGLESMLGTATLWPLLLGITVLPALLQLVLLPFCPESPRYLYISRNLEGPARKSLKRLTGWADVSGVLAELKEEKRKLERERPLSLLQLLGSRVHRQPLVIAVVLQLSQQLSGINAVFYYSTSIFEKAGVGQPAYATIGAGVVNTVFTLVSVFLVERAGRRTLHLLGLAGMCGCAILMTVALLLLERVPAMSYVSIVAIFGFVAFFEIGPGPIPWFIVAELFSQGPRPAAMAVAGFSNWTCNFIIGMGFQYVADAMGPYVFLLFAVLLLGFFIFTFLRVPETRGRTFDQISAAFHRTPSLLEQEVKPSTELEYLGPDEXD

SEQ ID NO: 23559 - protein, 451 aa, Sus scrofa
EFYNQTWLHRYGESISPATLTTLWSLSVAIFSVGGMIGSFSVGLFVNRFGRRNSMLMMNLLAFISAVLMGFSKLGKSFEMLILGRFIIGVYCGLTTGFVPMYVGEVSPTALRGALGTLHQLGIVVGILIAQVFGLDSIMGNEELWPLLLSVIFIPALLQCVLLPFCPESPRFLLINRNEENRAKSVLKKLRGTADVTRDLQEMKEESRQMMREKKVTILELFRSAAYRQPILIAVVLQLSQQLSGINAVFYYSTSIFEKAGVQQPVYATIGSGIVNTAFTVVSLFVVERAGRRTLHLIGLAGMAGCAVLMTIALALLEQLPWMSYLSIVAIFGFVAFFEVGPGPIPWFIVAELFSQGPRPAAIAVAGFSNWTSNFIVGMCFQYVEQLCGPYVFIIFTVLLVLFFIFTYFKVPETKGRTFDEIASGFRQGGASQSDKTPEELFHPLGADSQV

SEQ ID NO: 23560 - protein, 494 aa, Bos taurus
MGTTKVTAPLIFAISVATIGSFQFGYNTGVINAPEAIIKDFLNYTLEERSEPPPSSVLLTSLWSLSVAIFSVGGMIGSFSVGLFVNRFGRGNSMLIVNLLAIAGGCLMGFCKIAESVEMLILGRLIIGLFCGLCTGFVPMYIGEISPTALRGAFGTLNQLGIVIGILVAQIFGLKVILGTEDLWPLLLGFTILPAIIQCAALPFCPESPRFLLINRKEEEKAKEILQRLWGTEDVAQDIQEMKDESMRMSQEKQVTVLELFRAPNYRQPIIISIMLQLSQQLSGINAVFYYSTGIFKDAGVQEPVYATIGAGVVNTIFTVVSVFLVERAGRRTLHLIGLGGMAFCSILMTISLLLKDNYSWMSFICIGAILVFVAFFEIGPGPIPWFIVAELFGQGPRPAAMAVAGCSNWTSNFLVGLLFPSAAFYLGAYVFIVFTVFLVIFWVFTFFKVPETRGRTFEEITRAFEGQTQTGTRGEKGPIMEMNSIQPTKDTNA

SEQ ID NO: 23561 - protein, 472 aa, Salmonella typhimurium LT2
MVSINHDSALTPRSLRDTRRMNMFVSVSAAVAGLLFGLDIGVIAGALPFITDHFVLTSRLQEWVVSSMMLGAAIGALFNGWLSFRLGRKYSLMAGAILFVLGSLGSAFASSVEVLIGARVILGVAVGIASYTAPLYLSEMASENVRGKMISMYQLMVTLGIVLAFLSDTAFSYSGNWRAMLGVLALPAVLLIILVVFLPNSPRWLAQKGRHIEAEEVLRMLRDTSEKARDELNEIRESLKLKQGGWALFKANRNVRRAVFLGMLLQAMQQFTGMNIIMYYAPRIFKMAGFTTTEQQMIATLVVGLTFMFATFIAVFTVDKAGRKPALKIGFSVMALGTLVLGYCLMQFDNGTASSGLSWLSVGMTMMCIAGYAMSAAPVVWILCSEIQPLKCRDFGITCSTTTNWVSNMIIGATFLTLLDSIGAAGTFWLYTALNIAFIGITFWLIPETKNVTLEHIERKLMAGEKLRNIGV

SEQ ID NO: 23562 - protein, 501 aa, Ovis aries
MEPQDPVKREGRLTPVIVLATLIAAFGSSFQYGYNVATINSPSEFMKDFYNYTYYDRVGEYMNEFYLTLLWSVTVSMFPFGGFLGSLMVGPLVNNLGRKGTLLFNNIFSIVPALLMGFSDLAKSFEMIIVARVLVGICAGLSSNVVPMYLGELAPKNWRGALGVVPQLFITIGILVAQIFGLRSLLANEEGWPILLGLTGIPAVLQLLFLPFFPESPRYLLIQKKDEEAAKRALRRLRGWHDVDAEIEEILEEDRAEKAAGFISVLKLFKMRSLRWQVISIIVLMAGQQLSGVNAIYYYADQIYLSAGVKEDDVQYVTAGTGAVNVLITVCAIFVVELMGRRFLLLLGFSVCFTACCVLTGALAMQDVISWMPYVSIACVISYVIGHALGPSPIPALLVTEIFLQSSRPAAYMVAGTVHWLSNFTVGLVFPFIQVGLGAYSFVIFAVICFLTTVYIFLIIPETKSKTFIEINQIFIKMNKVPGVHPEKEELKEFPPSTARQ

SEQ ID NO: 23563 - protein, 743 aa, Hordeum vulgare subsp. vulgare
  unsure (1)..(743): unsure at all Xaa locations
MSSGAVLVAIAASIGNLLQGWDNATIAGAVLYIKKEFSLETQPLIEGLIVAMSLIGATVITTFSGAVADAVGRRPLLIASSVLYFVSGLVMLWAPNVYVLLLARLIDGFGIGLAVTLVPLYISETAPTDIRGLLNTLPQFSGSGGMFLSYCMVFTMSLMPQPDWRIMLGVLSIPSLMYFALTVFYLPESPRWLVSKGRMAEAKRVLQRLRGREDVSGEMALLVEGLGVGKDTHFEEYIIGPDDELADDGLAPDQEKLKLYGAEEGVSWIARPVRXGGQSALGSALGLMSRHGSMVSQGKSLVDPLVTLFGSVHEKMPEVMGSMRSTLFPNFGSMFSVAEQQQAKADWDAESHRDDEDYASDHGADDIEDNLNSPLISRQATSVEGKEIAAPHGSIMGGVESSSMQGGDAVSSMGIGGGWQLAWKWTEREGADGQKEGGFQRIYLHEEGVSGDRRGSILSMPGGDIPPGGEYIQAAALVSQPALYSKDLIEQQLAGPAMVHPSEAVAKGTKWAELFEPGVKHALFVGIGLQILQQFAGINGVLYYTPQILEQAGVGILLSNIGLSSSSASILISALTTLLMLPSIGIAMRLMDMSGRRFLLLSTIPVLIVALAILVLVNVLDVGTMVHAALSTISVIVYFCFFVMGFGPIPNILCAEIFPTSVRGICIAICALTFWIGDIIVTYTLPVMLNAIGLAGVFGIYAVVCMIAFVFVYMKVPETKGMPLEVITEFFSVGAKQGKEATD

SEQ ID NO: 23564 - protein, 471 aa, Burkholderia fungorum
MYMEKEIAGTAGVQASVSARLDRLPPTRYFSGLVARIAIGGWFEFYEMFMAAYISLGLISSGLYRATTAGLFDVDGFASFLGSFFAGMFVGTVALGGFTDRFGRRAVFTCAMLIYSVATFAAAFQHSPQAMDLWRFVAGLGIGVQLITVDTYISELTPHHTRGRYSAFSILVILTSVPTVAVLSFLLVPHTILGLEGWRWVMIIGSAGAVLIWFMRRGLPESPRWLESKGRLDEARAIVDAIEARVVAETGRALQAPAQRAPQPLTGEHGGSWSEMWKGRYLSRTIMLSFFNFFQTFGVYGFGAWVPVLLYTKGITITHSLLYTMVIAFATPLGALGAMACAERIQRKWQLVGCAIVVAVAGVLFGMVREPLLILLFGSAVTIANNWLIGIFHTYQAELYPTRIRARAVGFVFSWSRLSSIFVGFWVAALLKHSGVPAVFVLISSAMFVIVVMVGLLGPKTNGIRLEELSQ

SEQ ID NO: 23565 - protein, 212 aa, Corynebacterium ammoniagenes
GWIRITVLLAMLMGLTQQITGVNAVVYFAPTMMNQVGISATNSVYTSIVIGVVSVIACMVGIKVVDRIGRKRLLLIGLAGNTISLFILAGAYSFANGSVFFAMVSLFFMATFIASQQAAVSPATWLLISELVPSQVRGLGMGIAGLSLWVTNWAVAQYFLPLVEWLTGPVAFAIFGVLGIIAMGYTRALVPETMGKSLDEVGAEMHNRYAHK

SEQ ID NO: 23566 - protein, 493 aa, Anopheles gambiae str. PEST
QARDAMSKFVVNNVAGESGRKLPQYIAGLAASGGALAAGTFLGWTAPTDKPLTVEGEYGFPVSDEQFSWVGSISNLGAALMCFPIGYMMKLIGRKWSMLAMVLPLVLGWLLIIFAENVAMLMVGRFFLGVGGGAFCVAAPTYTAEIAQPSIRGTLGTFFQLMVTVGILFVYAVGAGVDVQVLSIICGVIPLVFGAIFFFMPESPYYFVEKGRYSEAASSLKWLRGAQYDENAEIEDLKQADEKVKAEAIPMLVAFRQKATVRALAISLGLMFFQQLSGINAVIFYNSAIFASANGGKEMSSASIIVGGIQVVATLLASVVVDKVGRRILLLVSDLMMAVSTILLAVYFQLKQDDPAKVDDLSWLAVLAVCLFIAMFSIGYGPVPWLMVGELFANNVKAFASPVAGVFNWLLAFLVTKVFTNLKDAMGEAGVFWLFSGISLLGTVFVFLVVPETKGKSLNNIQRLLAGEKLNADEPAGLPEPRDERDERPAQVA

SEQ ID NO: 23567 - protein, 497 aa, Anopheles gambiae str. PEST
RVSNGSKMVKILMRADTHVSFSVPIEEPVAKCTFSQVLAALSVSLGSMVVGFSSAYTSPALVSMKDRNITSFEVTDQSGSWVGGIMPLAGLAGGILGGPMIEYLGRKNTILATATPFIISWLLIGCATHVAMVLVGRALSGLCVGIASLSLPVYLGETVQPEVRGTLGLLPTAFGNIGILLCFVAGKYLDWSGLAFLGAALPIPFLLLMFLIPETPRWYVSRNREDRARKALQWLRGRKADVEPELKGISKSHQDAERHASSSAMLDLLNKANLKPLLISLGLMFFQQLSGINAVIFYTVQIFQSAGSTIDEKLCTIIVGVVNFIATFIATVLIDRLGRKILLYISDVAMIITLMTLGTFFYMKNNGDDVSEIGWLPLAAFVVFVVGFSLGFGPIPWLMMGEILPGKIRGSAASVATAFNWSCTFVVTKTFADITASIGNHGAFWMFGSICIVGLLFVIVYVPETQGKSLEDIERKMMGRVRRMSSVANIKPLSFNM

SEQ ID NO: 23568 - protein, 483 aa, Anopheles gambiae str. PEST
AVKMSSSAPGATNPMLYDPIPEGQGSTTKRNQFVAALGICMAAVSGGTALAWTSPVLAQLVPANQSDTSGLEHESFLLTTDEGSWVGAFLAVGAFLGALPAGYLAEKIGRKYTTMSLAVPYLISWALIIFATGAGMLYAGRLVIGIATGASCVVAPMFISEVAETSIRGALGAFFQLHLTVGILFVYAVGSYTHWVTLSILCAIFPVLLIVAMFIVPESPVYLVKKGRRIDAGVALKWFWGPNADTQSALQTIQSDLDAASGEAKVSDLFTNPTNRAALFISLLLMFFQQFSGINAVIFYTAPIFQSAGSTMDPAVCSIVVGVVQVVMTLASSVLIDKAGRRILLLQSSFIMGACLIVLGVYFKMQNDKVDVSNIGWLPLASVVLFIISFSLGFGPIPWMMMGELCAPDIKGLASALAVMFNWTLVFLVTKSFGTMQELLGSDWTFWFFGAWMMVCTVYVFIKVPETKGKTNAQIQAILGGKK

SEQ ID NO: 23569 - protein, 508 aa, Corynebacterium glutamicum ATCC 13032
MTDIKATSSTSATTAPTAGRPARRLGQISLVACLGGLLFGYDTGVANGAEGHMAQELGLNVLQLGVVISSLVFAAAFGALFAGRISDEIGRRKAIITLSVLFFLGSILVVFSPAGELGQFYGPGFATLVTGRIMLGLAVGGASTVVPVYLAELAPLEIRGSLTGRNELAIVTGQLLAFVINALIAVTLHGVIDGIWRIMFAVCALPAVALFLGMLRMPESPRWLVNQGRYDDARRVMETVRTPERAKAEMDEIIAVHSENNAALPGVKQSSGQASGQVSSKHTHMSIGEVLSNKWLVRLLIAGIGVAVAQQLTGINAIMYYGTRVLEESGMSAEMAVVANIAFGAVAVIGGLIALRNMDRLDRRTTFIIGLSLTTTFHLLIAAAGTLLPEGNSIRPFAIMILVVGFVLSMQTFLNVAVWVWLAEIFPVRMKGIGTGISVFCGWGINGVLALFFPALVSGVGITFSFLIFAVVGVIALAFVTKFVPETRGRSLEELDHAAFTGQIFKKA

SEQ ID NO: 23570 - protein, 459 aa, Thermoplasma acidophilum
MISSMTESWEELKERAYGPMDKQKSKWFNYKMLLLTGGGIFVDGYNIVIISFGLAGIETLFGLQHNAFLVGLIGISVIIGNLVGALLSGYFVDKVGRRTIFIIDLILFVFFAIISGLVTNAYELVVARLLVGLGIGLDYPIATSYLSEYTPINPRGKFLVMNITFFNIAGVVAAIVGYSLLPLGATIAWRYMLMSAAVPAAITIAGRIRTPESPRWLLEHGRKKEAIQAIERVTESTLPDDTQKFIMDSNVKPPVSGYYKELLTKYTKSAIFIGLFYFFFAIAFVNASLYGPSILASFGEAGLIGSSLYWLLFVVGDIICILVIDSFGRRNSTLTGWAGMLITMIILAFAPSNLKLLSLGAFILFAMFQGIGPGSLHMVYSPELFPTRIRATAEGWKQGIGRLGGVLTGLFFPSLVIGDKLLILILTSIAGLVLSILMAPETKRKGLEEISEKDINLQI

SEQ ID NO: 23571 - protein, 474 aa, Thermoplasma acidophilum
MESNAYAKPVKVPGRSIITSLSAMGYFLDGYDLSVISVFTLVLVTYHIFRYTAFTESFVTGSALLGAFVGAVLFGHYADRIGRRYLYIFDLIFFAVFAVLTALATNIYEMIAFRFFVGLGVGADYSLSPVYTTEMYPNAKRGGGYGWVWTFWSLGAAAAFIIGYGFYLIDPLTGWRWTLGLGAIPAIVVVVMRMRMPESIRWKAADKNVSEQEIRDVADSIGIKKEEMDSIMAERNRESRIRSGSLSSLFKGEYGKRTLIVWIQWILYDIAGYGIGLYSPLILKELGVSGSYTLLYSFMFYMPIGFMGAFGAVMLNDRVGRRPLQILGFGSMALAILLFFFAASGKGQVFLAIGILAFIIDYALGNLGPGNTMGLYAIELLPTKLRSSSMGSATGITRIVSFLSAFLFPYLSKPTVLGKEGFFFVLFVVMILALIFTIFFTPETKGLSLEEITVAKYRHEGWKPVLALDDTSKK

SEQ ID NO: 23572 - protein, 567 aa, Kluyveromyces lactis
MSNQMTDSTSAGSGTEHSVDTNTALKAGSPNDLKVSHEEDLNDLEKTAEETLQQKPAKEYIFVSLCCVMVAFGGFVFGWDTGTISGFVNQTDFLRRFGQEKADGSHYLSNVRTGLIVSIFNIGCAVGGIVLSNIGDRWGRRIGLITVIIIYVIGIIIQIASVDKWYQYFIGRIISGLGVGGITVLSPMLISETAPKHLRGTLVSCYQLMITFGIFLGYCTNYGTKNYSNSVQWRVPLGLCFAWAIFMVLGMMFVPESARFLVETDQIEEARKSLAKTNKVSIDDPVVKYELLKIQSSIELEKAAGNASWGELITGKPSMFRRTLMGIMIQSLQQLTGDNYFFYYGTTIFQSVGMDDSFETSIVLGIVNFASTFFALYTVDHFGRRNCLLYGCVGMVACYVVYASVGVTRLWPDGPDHPDISSKGAGNCMIVFACFYIFCFATTWAPIAYVVISESYPLRVKGKAMAIASASNWIWGFLIGFFTPFITSAIHFYYGYVFMGCMVFAFFYVYFFVPETKGLTLEEVNEMYSEGVLPWKSSSWVPSSRRGAEYDVDALQHDDKPWYKAML

SEQ ID NO: 23573 - protein, 551 aa, Kluyveromyces lactis
MSLKNWLLLRDIQYEGTFYKKFPHVYNIYVIGFIACISGLMFGFDIASMSSMIGTDVYKDYFSNPDSLTYGGITASMAGGSFLGSLISPNFSDAFGRKVSLHICAALWIIGAILQCAAQDQAMLIVGRVISGMGIGFGSSAAPVYCSEISPPKIRGTISGLFQFSVTVGIMVLFYIGYGCHFIDGAAAFRITWGLQMVPGLILMVGVFFIPESPRWLANHDRWEETSLIVANIVANGDVNNEQVRFQLEEIKEQVIIDSAAKNFGYKDLFRKKTLPKTIVGVSAQMWQQLCGMNVMMYYIVYIFNMAGYTGNTNLVASSIQYVLNVVMTIPALFLIDKFGRRPVLIIGGIFMFTWLFSVAGILATYSVPAPGGVNGDDTVTIQIPSENTSAANGVIASSYLFVCFFAPTWGIGIWIYCSEIFNNMERAKGSALSAATNWAFNFALAMFVPSAFKNISWKTYIIFGVFSVALTIQTFFMFPETKGKTLEEIDQMWVDNIPAWRTANYIPQLPIVKDEEGNKLGLLGNPQHLEDVHSNEKGLLDRSDSASNSN

SEQ ID NO: 23574 - protein, 716 aa, Kluyveromyces lactis
MESEIFLAPPAKQSKKISILVGMFVAVGGFLFGYDTGLINNISEMPYVNQKFAPNKNHFTTPQISILVSFLSLGTFIGALLAPLISDSYGRKTTMIFSTFVVFMIGNSLQVAAGSMTILVVGRVLSGMSVGLISAAVPLYQSEAAQKSVRGAIISCYQWAITWGLLVASAVSQGTYKRMDASSYQIPIGLQYIWSFLLGVGILFLPESPRYYVFKDRLDKAAKSLSFLRGVPEDDSGLLEELVEIKATYDYEMSFGKISYLDCFRSTRSRTKQRLRMLTGIALQAFQQVSGINFIFYYGVDFFNKSGVSESYLVSFVTYAVNVAFNIPGLFLVEYIGRRKLLLMGGILMTISNFIIAIVGLATDSMVANKVMIAFICLFIASFSATWGGGVWVISAELYPLGVRAKCTAICAASNWLINFICALITPYIMHIDSSVRQTSIGTKIFFVWGSLNAVGVLVVYFTVYETNGLSLEEIDELYKKSSSGINSIEWNKKIKAFPDLFQRTRPNNEGDGEADDNIHTDENYNHTISSYNGTQNNEKYPIQVQMPQFGVRNIEFLNTTGSSPQSDMTEPNFVDLGNGLGITTYQRGPPSVLTDSSEEEEEGQQQETDETEEGKSFKHQYTDARNKNRGERGSFNSNSSTSGTTRSSSHKASVQRMEEINLYMAQLMHRGGTEDLSRNTTDNTHQPISHDIMSQWNSSSQNKGPSTQTDINSNT

SEQ ID NO: 23575 - protein, 513 aa, Picea abies
MAGGMAVSRPKQGRAELYEGHITAYVILACIVAATGGSLFGYDLGVSGGVTSMDDFLKKFFRHVYERKQHHLRETDYCKYDNQLLTLFTSSLYLSGLVATFGASYITRSKGRRVSIIIGGLSFLLGAILNAAAKNLGMLIVGRILLGAGVGFSNQSVPLYLSEMAPAKVRGGTNNLFQLKTCLGIFVTNVINYFTNKLHPWGWRLSLGLAVIPALLMSIGGYFLPETPNSLVEQGRLQEGRQILEKIRGTKNVQAEFDDLVEASDVARAVKHPFRNLLQRRNRPQLVMGTCIPAFQQLTGNNSFLFYAPVIFQSLGMGNDASLYSAIMTGAVITFGALVSMFTVDRVGRRFLFMEGGTQMIVCHVIISILLKSNFGKGEKIPTGYGVGIVLLICIFYLLAYGWLWGPLSWLVCSEIFPMESLVVCVNLFFTAVIAQSFLALLCHLKYGIFLLFGGLVFIMSVVIYFFLPETKNVPIEEMRFQWAKHWYWKRFMDEYMDNDDENEKGNMTKAAA

SEQ ID NO: 23576 - protein, 551 aa, Spinacia oleracea
MQASTFMVKGNLGFEVQNRRVAGLAGLKGLSSIRSNNLSFVNVNDNNYKSNPCKLSCGSLSMGAGFARLGLDHVMKSSPKYRSVKAQAASGGDLEDATPVKYQGKSSASVLPYVGVACLGAILFGYHLGVVNGALDYLSADLAIAGNTVLQGWVVSILLAGATVGSFTGGSLADKFGRTKTFQLDAIPLAIGAYLCATAQNVQIMMIGRLLCGIGIGISSALVPLYISEISPTEIRGALGSVNQLFICIGILAALVAGLPLAGNPLWWRTMFGIATVPSVLLALGMGFCPESPRWLFQQGKIVEAEKAVAALYGKERVPEVINDLRASVQGSSEPEAGWFDLFSSRYRKVVSVGAALFLFQQMAGINAVVYYSTSVFRSAGIASDVAASALVGASNVIGTAVASSLMDKQGRKSLLMTSFSGMAASMLLLSLSFTWKALAPYSGTLAVVGTVLYVLSFSLGAGPVPALLLPEIFASRIRAKAVALSLGMHWASNFVIGLYFLSVVTKFGISKVYLGFASVCVLAVLYIAGNVVETKGRSLEEIELALSPAV

SEQ ID NO: 23577 - protein, 508 aa, Arabidopsis thaliana
MPSVGIVIGDGKKEYPGKLTLYVTVTCIVAAMGGLIFGYDIGISGGVTTMDSFQQKFFPSVYEKQKKDHDSNQYCRFDSVSLTLFTSSLYLAALCSSLVASYVTRQFGRKISMLLGGVLFCAGALLNGFATAVWMLIVGRLLLGFGIGFTNQSVPLYLSEMAPYKYRGALNIGFQLSITIGILVANVLNFFFSKISWGWRLSLGGAVVPALIITVGSLILPDTPNSMIERGQFRLAEAKLRKIRGVDDIDDEINDLIIASEASKLVEHPWRNLLQRKYRPHLTMAILIPAFQQLTGINVIMFYAPVLFQTIGFGSDAALISAVVTGLVNVGATVVSIYGVDKWGRRFLFLEGGFQMLISQVAVAAAIGAKFGVDGTPGVLPKWYAIVVVLFICIYVAAFAWSWGPLGWLVPSEIFPLEIRSAAQSITVSVNMIFTFLIAQVFLMMLCHLKFGLFIFFAFFVVVMSIFVYLFLPETRGVPIEEMNRVWRSHWYWSKFVDAEKNLTKVVI

SEQ ID NO: 23578 - protein, 510 aa, Ricinus communis
  unsure (1)..(510): unsure at all Xaa locations
MAAGLAITSEGGQYNGRMTSFVALSCMMAAMGGVIFGYDIGVSGGVTSMDPFLKKFFPDVYRKMKEDTEISNYCKFDSQLLTSFTSSLYVAGLVASFFASSVTRAFGRKPSILLGGXVFLAXAALGGAAVNVYMLIFGRVLLGVGVGFANQAVPLYLSEMAPPRYRGAINNGFQFSVGIGALSANLINYGTEKIEGGWGWRISLAMAAVPAAILTFGALFLPETPNSLIQRSNDHERAKLMLQRVRGTTDVQAELDDLIKASIISRTIQHPFKNIMRRKYRPQLVMAVAIPFFQQVTGINVIAFYAPILFRTIGLEESASLLSSIVTGLVGSASTFISMLIVDKLGRRALFIFGGVQMFVAQIMVGSIMAAELGDHGGIGKGYAYIVLILICIYVAGFGWSWGPLGWLVPSEIFPLEIRSAGQSIVVAVSFLFTFVVAQTFLSMLCHFKSGIFFFFGGWVVVMTAFVHFLLPETKKVPIEKMDIVWRDHWFWKKIIGEEAAEENNKMEAA

SEQ ID NO: 23579 - protein, 518 aa, Oryza sativa (japonica cultivar-group)
MAIGAFVESGGGGGGGGGGGYGGRVTAYVVLTCVVAGSGGILFGYDLGISGGVTSMDSFLKRFFPDVYQKKQDTRVSHYCAFDSELLTVFTSSLYIAGLVATLFASSVTRRYGRRTSMLIGGTVFIAGSVFGGAAVNVFMLLINRILLGIGLGFTNQSIPLYLSEMAPPRYRGAINNGFELCISLGILFANVLNYCVVKITAGWGWRISLSMAAVPAAFLTIGAVFLPETPSFIIERDGDTDKARILLQRLRGTTSVQKELDDLVAASNLSRTVQYPFRNIFKRKYRPQLVIALLVPFFNQLTGINVMNFYAPVMFRTIGLKESASLLSSVVNRLCATFANIMAMIVVDRFGRRKLFLVGGIQMILSQLAVGAILAAEFKDYGSMDREYAYLVLITMCVFVAGFAWSWGPLTFLVPTEICPLEIRSAGQSIVVAVVFLMTFVIGQTFLAVLCRIKSGTFFFFAGWICLMTVFVYFFLPETKKLPMEQMEQVWRKHWFWKKIVGEEEEKQAEKTALPSM

SEQ ID NO: 23580 - protein, 520 aa, Oryza sativa (japonica cultivar-group)
MAVGVVAGVESQERRGGGAGTGRVTAFVVLSCVTAGMGGVIFGYDIGIAGGVSSMEPFLRKFFPEVHRRMEGDVRVSNYCKFDSQLLTAFTSSLYVAGLLTTFAASRVTAGRGRRPSMLLGGAAFLAGAAVGGASVDIYMVILGRVLLGVGLGFANQAVPLYLSEMAPSRWRGAFSNGFQLSVGVGALAANVINYGTEKIRGGWGWRVSLALAAVPAGLLTLGALFLPETPNSLIQQGKVERCDVEQLLKKIRGADDVADELDTIVAANSATAGVGGGGLLMLLTQRRYRPQLAMAVMIPFFQQVTGINAIAFYAPVLLRTIGMGESASLLSAVVTGVVGVGATLLSMFAVDRFGRRTLFLAGGAQMLASQVLIGGIMAAKLGDDGGVSRAWAAALILLIAAYVAGFGWSWGPLGWLVPSEVFPLEVRSAGQSVTVATSFVFTVFVAQAFLAMLCRMRAGIFFFFAAWLAAMTAFVYLLLPETKGVPIEEVAGVWRGHWFWSRVVGGDGEEEERNNGGKL

SEQ ID NO: 23581 - protein, 524 aa, Oryza sativa (japonica cultivar-group)
MAPSAAAPEIQELIHHPYDGRVTSFVVLSCVTACLGGILFGYDIGVSGGVTSMDAFLERFFPEVYRRMHGGGERVSNYCRFDSQLLTAFTSSLYVSGLATTFLASHVTARRGRRASMLVAGAAIAAGATVGASAAGLATVILGRVLLGVGVGFGNQAVPLYLSEMAPPSRRGAFSNGFQLCVSVGAFVAQLINFGAEKIAGGWGWRVSLAVAAVPAAFLAVGAVFLPETPNSLVQQGEDHGKVRALLSKIRGSDGAGVDDELDDIVAADRCKVTARRGLTLMLTHRRYRPQLVMAVMIPFFQQMTGINAIAFYAPVLLRTVGMGESAALLAVVIKQVVGIGATLASMLAVDRFGRRTLFLAGGAQMVISQLLIGAIMAAQLGDDGELSQASALLLIVLVAVYVAGFAWSWGPLGWLVPSEIFPLEVRSAGQSIAVAVNFLLTTAVAQSFLAMLCHMKAGIFFFFAAWLVAMTAFVYLLLPETKGLPIEQVGKLWARHWFWRRFVVTDSGVDGEEEGEAIDADKL

SEQ ID NO: 23582 - protein, 534 aa, Oryza sativa (japonica cultivar-group)
MAGGVIVANDGDGSAVDHGGRLTFSVVITCLVAASGGLIFGYDVGISGGVSTMEPFLRRFFPGVVRRMAEARPGNEYCVYDSQALTAFTSSLYVAGLVASLVASRVTRAMGRQAVMVMGGALFFAGGAVTGFAVNIAMLIVGRMLLGFGVGFTNQHDGFDRVVWVLDERNGQAAPLFLAEMAPTRWRGSLTAGFQFFLAVGVVIATVTNYFASRVPWGWRLSLGLAGAPAVVIFLGALFLTDTPSSLVMRGDTARARAALLRVRGAGADVEAELKGIVRAVEVARQGEDGAFRRMAARREYRPYLVFAVAMPMFFQLTGVIVISFFSPLVFRTVGFGSNAALMGNVILGAVNLVCLMLSTLVIDRYGRKVLFMVGGAIMIIAQVGVAWIMGAQVGKNGSEAMARPYAVAVVAFTCLHTAGFGWSWGPLGWVIPGEIFPVDIRSAGQAMNVSIGLGLTFVQTQSFLAMLCRFRYGTFAYYAAWVAVMTVFIAVFLPETKGVPLESMATVWARHWYWKRFAREQPKTSADEPTGTY

SEQ ID NO: 23583 - protein, 501 aa, Oryza sativa (japonica cultivar-group)
MADYGGGGGSGGGLTFPVVVTCLMAASGGLIFGYDIGISGGVSEMESFLEKFFPGLLKGTAHASKDVYCIYNSQALTAFTSSLYAFGMVGTLVASRVTRRTGRQAVMLIGGSMFLVGALVNAAAVNIAMLIIGRMLLGLGLGFSGQATPVYLAEMSPPRWRGGFISGFPLFISVGYLIANLINYGTSRIPVWGWRLSLGLAAFPAAVMVAGAAFIPDTPSSLVLRGKHDLARAALQRVRGKGVDVDAEFNDILAAVEHDRRNDEGAFRRILRREYRPYLVMAIAFPVFLNLTGVAVTAFFSPILFRTVGFESDAALMGAVILGLMNIFGIVGSGFAMDRYGRRLLFMIGGALMFTCQVAMASIVGSQLGHGSKMAKGYAVTVLVMTCAFSASFSWSWGALYWAIPGEIYPVEVRSAGQGVAVALNLGLNFVQAQCFLAMLCCFKYGTFLFYASWLVVMTAFAVAFVPETKGVPLESMGHVFARHWYWGRFVKDHKFGDVST

SEQ ID NO: 23584 - protein, 523 aa, Lycopersicon esculentum
MAGGGFTTSGNGGTHFEAKITPIVIISCIMAATGGLMFGYDVGVSGGVTSMDPFLKKFFPTVYKRTKEPGLDSNYCKYDNQGLQLFTSSLYLAGLTATFFASYTTRKLGRRLTMLIAGCFFIIGVVLNAAAQDLAMLIIGRILLGCGVGFANQAVPLFLSEIAPTRIRGGLNILFQLNVTIGILFANLVNYGTAKISGGWGWRLSLGLAGFPAVLLTLGALFVVETPNSLIERGYLEEGKEVLRKIRGTDNIEPEFLELVEASRVAKQVKHPFRNLLQRKNRPQLIISVALQIFQQFTGINAIMFYAPVLFSTLGFGNSAALYSAVITGAVNVLSTVVSVYSVDKLGRRVLLLEAGVQMLLSQIIIAIILGIKVTDHSDNLSHGWGIFVVVLICTYVSAFAWSWGPLGWLIPSETFPLETRSAGQSVTVCVNLLFTFVMAQAFLSMLCHFKYGIFLFFSGWIFVMSLFVFFLLPETKNVPIEEMTERVWKQHWLWKRFMVDEDDVDMIKKNGHANGYDPTSRL

SEQ ID NO: 23585 - protein, 523 aa, Lycopersicon esculentum
MAGGGFTTSGNGARISRLKSHQLVIISCIMAATGGLMFGYDVGVSGGVTSMDPFLKKFFPTVYKRTKEPGLDSNYCKYDNQGLQLFTSSLYLAGLTATFFASYTTRKLGRRLTMLIAGCFFIIGVVLNAAAQDLAMLIIGRILLGCGVGFANQAVPLFLSEIAPTRIRGGLNILFQLNVTIGILFANLVNYGTAKISGGWGWRLSLGLAGFPAVLLTLGALFVVETPNSLIERGYLEEGKEVLRKIRGTDNIEPEFLELVEASRVAKQVKHPFRNLLQRKNRPQLIISVALQIFQQFTGINAIMFYAPVLFSTLGFGNSAALYSAVITGAVNVLSTVVSVYSVDKLGRRVLLLEAGVQMLLSQIIIAIILGIKVTDHSDNLSHGWGIFVVVLICTYVSAFAWSWGPLGWLIPSETFPLETRSAGQSVTVCVNLLFTFVMAQAFLSMLCHFKYGIFLFFSGWIFVMSLFVFFLVPETKNVPIEEMTERVWKQHWLWKRFMVNEDDVDMIKKNGHANGYDPTSRL

SEQ ID NO: 23586 - protein, 292 aa, Lycopersicon esculentum
NHDEAKARLKRIRGIEDVDEEFNDLVIASEASRKIEHPWRNLLQKKYRPHLTMAIMIPFFQQLTGINVIMFYAPVLFKTIGFGTDASLMSAVITGGINVIATIVSIYYVDKLGRRFLFLEGGIQMLFSQIAVAILIAIKFGVNGTPGELPKWYAIVVVIFICVYVAGFAWSWGPLGWLVPSEIFPLEIRSAAQSINVSVNMIFTFAVAQVFLTMLCHLKFGLFLFFAFFVVIMTVFIYFFLPETKNIPIEEMVIVWKEHWFWSKFMTEVDYPGTRNGTAVEMAKGGAGYKIV

SEQ ID NO: 23587 - protein, 520 aa, Oryza sativa
  unsure (1)..(520): unsure at all Xaa locations
MAGGAMVQTVGGKTYPGKMTAFVFFTCLVASSGGLIFGYDIGISGGVTSMDSFLSEFFPSVYAQAKASKDTNQYCKFDSQLLTLFTSSLYLAALATSFVAAWVTRVFGRKWSMFCGGVTFLAGSALNGAATDVMMLILGRILLGIGVGFANQSVPLYLSEMAPANLRGMLNIGFQLMTTIGILSANLINYATSSIEGGWGWRIGLGLAGVPALIITLGALVLPDTPNSLIARGYAGDAKRVLVKIRGTDDVHDEYDDMVAASEEAASIEHPWRNILHRKYRPQLTIAILIPCFQQLTGINVIMFYAPVLFLTIGFAGDASLMSAVITGLVNMFATVVSIISVDRLGRRVLFLQGGTQIFISQXLFGXLIALQFGVAGVXGEMSRSYAILLVLFICMYVAGFAWSWGPLGWLVPSEVFALEIRSAGQSIAVCVNMMLTFVIGQAFLTMLCHLKFGLFYFFAGWMLVMTTFVALFLPETKGVPIEEMNHVWSRHWFWGSYVTAHDVAGAGAGGGGNRRSHNV

SEQ ID NO: 23588 - protein, 512 aa, Oryza sativa; identical to SEQ ID NO: 23495

SEQ ID NO: 23589 - protein, 523 aa, Oryza sativa
MPGGGAMVAASGAGRPEYPGGLTMFVSMACLVAATGGLIFGYDIGVSGGVTSMDPFLSRFFPSVYRAQSAAAAAAGGNQYCRFDSQLLTMFTSSLYLAALASSLGAATVTRVAGRKWSMFAGGLVFLAGCALNGAAANVAMLIVGRVLLGVGIGFANQSVPVYLSEMAPARMRGMLNNGFQMMITTGVLAANLINYGTARIAGGWGWRLSLALAAVPAAVMTAGALFLPETPNSLLERGRRGEARRMLQRVRGEGVDMEDEYNDLVAAGEASHAVASPWRDILRRRNRPPLVMAVAIPLFQQLTGINVIMFYAPVLFRTLGFGGGASLMSAVITGGVNMAATLVSVLAVDRVGRRALFLEGGAQMVASQAAVGALIGARLGWSGTAAIPAGYAAAVVAAMCVYVAAFAWSWGPLAWLVPSEVMPLEVRPAGQSITVAVNMAMTFAVAQAFLPLLCRLRFVLFFFFAGWVAAMTAFVALFVPETKGVPIEDMAAVWSDHWYWKRFVDGDGDGARRRGDIEMGHK

SEQ ID NO: 23590 - protein, 522 aa, Oryza sativa
MAAATAADVAEDTASVYSGKLTLYVFLTCGVAATGGLIIGYDIGISGGVTSMDTFLGKFFPSVLHQEQTAQGTSQYCKFNSQPLTAFTSSLYLAALVASFFVASFTRALGRKWSMFGGGVSFLAGATLNGAARNVAMLIVGRILLGIGVAFCGLSTPIYLSEMAPPRLRGMLNIGLQLMITVGIFSANLVNYGAAKIRGGWGWRVSLGLAAAPACVIAVGSLFLPDSPSSLINRGRHEQARRVLRRIRGTDEVDDEYGDLVAAASEIEVYSGCSARRRPWRDVLQRRYRPQLAMAVLIPFFQQLTGINVIMFYAPVLFKTIGLGGDASLMSAVITGLVNIVATFVSIATVDSLGRRKLLFQGGCQMLVSQVIIGTLIGVVFGTSGDGNISRALAVCIVVFICVYVAGFAWSWGPLGVLLPSEIFPLEVRPAGQSISVAVNMLCTFAVAEAFLPMLCHMRFGLFYFFSGWVLVMTLFVSAFLPETKGVPIEKMTVVWRTHWFWGRFYCNQDADAHVQVANSKV

SEQ ID NO: 23591 - protein, 523 aa, Oryza sativa
  unsure (1)..(523): unsure at all Xaa locations
MAAATAADVAEDTASVYSGKLTLYVFLTCGVAATGGLIIGYDIGISGGVTSMDTFLGKFFPSVLHQEQTAQGTSQYCKFNSQPLTAFTSSLYLAALVASFFVASFTRALGRKWSMFGGGVSFLAGATLNGAARNVAMLIVGRILLGIGVAFCGLSTPIYLSEMAPPRLRGMLNIGLQLMITVGIFSANLVNYGAAKIRGGWGWRVSXLGLAAAPACVIAVGSLFLPDSPSSLINRGRHEQARRVLRRIRGTDEVDDEYGDLVAAASEIEVYSGCSARRRPWRDVLQRRYRPQLAMAVLIPFFQQLTGINVIMFYAPVLFKTIGLGGDASLMSAVITGLVNIVATFVSIATVDSLGRRKLLFQGGCQMLVSQVIIGTLIGVVFGTSGDGNISRALAVCIVVFICVYVAGFAWSWGPLGVLLPSEIFPLEVRPAGQSISVAVNMLCTFAVAEAFLPMLCHMRFGLFYFFSGWVLVMTLFVSAFLPETKGVPIEKMTVVWRTHWFWGRFYCNQDADAHVQVANSKV

SEQ ID NO: 23592 - protein, 523 aa, Zea mays
MAGGGIVNTGGGKDYPGKLTLFVLLTCIVAATGGLIFGYDIGISGGVTSMNPFLEKFFPEVYRKKQEAKTNQYCKYDNQLLQTFTSSLYLAALVASFFAATVTRAVGRKWSMLVGGLTFLVGAALNGAAQNIAMLIVGRILLGVGVGFANQSVPVYLSEMAPARLRGMLNIGFQLMITIGILAAELINYGTNKIKAGYGWRVSLALAAVPAAIITLGSLFLPDTPNSLLERGHPEEARRMLRRIRGTDDIGEEYADLVAASEEARQVRHPWRNILRRRYRAQLTMAVAIPFFQQLTGINVIMFYAPVLFDTLGFKNDASLMSSVITGLVNVFATVVSIVTVDRVGRRKLFLQGGAQMIVCQLIVGTLIAAKFGTSGTGDIAKGYAAVVVVFICAYVAGFAWSWGPLGWLVPSEIFPLEIRPAGQSINVSVNMFFTFCIAQAFLTMLCHFKFGLFYFFAGWVVIMTVFIAFFLPETKNVPIEEMVLVWKSHWFWKRFIADEDVHVGIGNNHPAKNGSDTKGADA

SEQ ID NO: 23593 - protein, 539 aa, Zea mays
  unsure (1)..(539): unsure at all Xaa locations
MAGGVVVNAAGGKTYPGRMTPFVFFTCLVASSGGLIFGYDIGISGGVTSMASFLKEFFPSVYAKAAANKDTNQYCKFDSQLLTLFTSSLYLAALATSFVAASVTRVFGRKWSMFCGGVTFLXAGSALNGAATDVMMLIMGRILLGVGVGFANQSVPLYLSEMAPAKLRGMLNIGFQLMTTIGILAANLINFWTAGIEGGWGWRIGLGXLAGVPALIITLGALVLPDTPNSLIARGFNDDAKAVLVKIRGTDDVQDEYDDMVAASEEANAIEHPWRNILERRYRPQLTVAALIPFFQQLTGINVIMFYAPVLFLTIGFGDDASLMAAVITGLVNMFATVVSIVCVDRLGRRALFLQGGTQMFVSQIVVGTLIALQFGTAGVGEMSRSNAWLLVLFICLYVAGFAWSWGPLGWLVPSEVFALEVRSAGQSIAVCVNMLLTFIIGQAFLSMLCSLKFGLFYFFAGWMFIMTTFIALFLPETKGVPIEEMNLVWSRHWFWGKYVNVDTQHGGASPRSNGVXSEQAAATPRHLTWPCMHTYTII

SEQ ID NO: 23594 - protein, 536 aa, Zea mays
MAVAAPAAVSTGAGQGKEYPGGLTLYVLLTCAVAATGGLVCGYDIGISGGVTSMDAFLHKFFPSVYRKEQTARGGGSQYCKFDSQLLTAFTSSLYLAALAASFFVASVAHSLGRKWCMFGGGVSFLAGAALNAAAQDVAMLIVGRILLGIGVGFAGLSIPIYLSEMAPHHLRGTLNIGFQLMITVGIFSANLVNYGVDKIRGGWGWRLSLGLAAVPAAVITVGSLFLPDTPNSLIRRGYHEQARQVLARIRGADVDVADEYGDLVSASEASAAVRRPWLDVLGRRYRPQLTMAVLVPFFQQLTGINVIMFYAPVLFKTIGLGGDASLMSAVITGLVNIVATFVSIATVDRLGRRSLFLQGGCQMLVCQIVIGTLIGVQFGASGDGAAIPKASAATVVAFICIYVAGFAWSWGPLGVLVPSEIFPLEIRPAGQGINVAVNMMCTFAVAQAFLPMLCHLRFGLFYFFGGWVLVMTLFVAAFLPETKGVPVEKMGTVWRTHWFWGRFVADAGMDGRAGNRDSAFHKGKDIAIESRSRPV

SEQ ID NO: 23595 - protein, 555 aa, Schizosaccharomyces pombe
MNRFITSILVVFISMSGWLQGADTGSISGILGMRDFQSRFADRYNPISNSYSYSAWRQALLTGTINAGCLFGAMLSSPFTERIGKKYSICFFSGVYIIAELLLVTAVPSWIQVLVGKILAGVGIGALSVLSPGYQSEVAPPQIRGAVVATYQIFSTGAALVAACINMGTHKLRKTASWRTSFGINMLWGILLMVGVLFLPESPRYLIYKGRDEEALRIMCNMAELSPESEIIQTNFNTIKSDIEIEMAGGKARWIEIFGKDIRYRTCLGFLVMLFRELIGNNYYFYYATQVFKGTGMTDIFLPAVILGAINFGTTFGALYTIDNLGRRNPLIFGAAFQSICFFIYAAVGDRKLIYKNGTSDHRAGSVMIVFSCLFLFSYCCSWGPMGWVIVGETFPIRYRSKCASVATSGNWLGNFMISFFTPFINNAIGFKLGYIYACINLFSSFMIFFLAKETKGLTLEEVNDLYMSNIKPWESYKYVREIESHRIHFSKEEEKREREKSKGIRGQEEEFIENADEDNNDSSSSSGSVVSAVKPRRSAVSNDRFSEDSHPTYI

SEQ ID NO: 23596 - protein, 575 aa, Schizosaccharomyces pombe
MSISSKDFQNVTSAGFADDTFAADTFAADKKSPFESSVFENKTQVLPVDSVSRLSNGARSRSNSNISLSEPHALNDTVEDQPVSKWVWVLAFAAGIGGLLFGYDTGVISGALVVIGTSLGGHELTNGGKEFITSATSLGALLGGIIAGALADFFGRKPVIAIASIIIIVGSIVQVTAHHLWHMIVGRFVIGWGVGIASLIIPLYLSEIAPSKIRGRLVIIYVLLITAGQVIAYGIDTAFEHVHNGWRWMVGLAMVPAAFQLFILIWLPESPRLLVKKERSQEAYNTLARIYPTAHPYEIKTKLYLIQEGVRDPFSGSRWQKIVKTFKELYFNPSNFRALILACGLQAMQQLSGFNSLMYFSSTIFEVVGFNNPTATGLIIAATNFVFTIVAFGVIDFFGRRILLLLTVWGMIAALIVCAVAFHFLPKDENGNYTSGQSNAWAIVVLISMIVYVASYASGLGNLPWQQSELFPMSVRGLGTGMSTAVNWAGNLGIGASFLTLMSEITPTGTFALYGGLCFLGWLGALFCYPDLTDYTIEEIGELLKHGFGVRESMRHLKRVRQERAWSREDKEQNN

SEQ ID NO: 23597 - protein, 531 aa, Schizosaccharomyces pombe
MGFKRGKNFTLVMLIFVSMAGWMFGADTGSIGGVTSMRDFRERYADRYDPITDQYSLSSARQGLLTGMVNVGSLFGCIISSPIADRFGKRLSIIGFCAVYIIGIIVQVTAVPSWVQIMVAKIWTGIGIGALSVLAPGYQSETAPPSIRGTVVVTYQLFVTGGIFIAACINMGTHKLHKTAQWRVSIGINLLWGIITMIGILFLPESPRYLIQVGKDEEAVRVLSESAELFPDSEEVQNEYHRLKSSIDEEFAGGPCSWASIFGKDIRYRTFLGMFVMSLQQLTGNNYFFYYGFSVMQGAGINSPYLSAMILDAVNFGCTFGGMYVLERFGRRNPLIIGGIWQSICFFIYSAVGSRALYHKNGTSNTRAGAVMIVMACLFIFGFAQTWAPAAYVIVGESYPVRYRSKCAAVATASNWLWNFLISFFTPFIQASIGFKYGYVFASCNLTGAIVIFLFAKETKGLTLEEINELYMSVIKPWESGNFKLNYSEQKKVEKEKSRKGGARGESVEYVERASNTDSSPQYSSHEEDYA

SEQ ID NO: 23598 - protein, 557 aa, Schizosaccharomyces pombe
MSKTLTITMLLFVSMAGWMFGADTGSIGGITNMRDFQSRFADRYNPVTDTYSYSSARQGLITGMVNVGSFFGCLISSPTTDRIGKRNSIIGFCVIYLIGVIIQVTAVPSWVQIMVAKIWTGLGIGALSVLAPGYQSEVAPPHIRGTIVVTYQLCVTAGIFIAACINMGTHKLYKTAQWRVSIGINLLWGIITLVGVSFLSESPRYLVSIGKDDEAIQVMCKNAELPPDSDIIQTEYKQIKSDCEAAVEGGPCTWPEIFGKEIRYRTFLGMAIMSFNQLTGCNYYFYYGTQVFKGTGMESPYLASLILDAVNFGCTFGGLFVLEYCGRRVPLIIGGVWQSICFFIYAAVGNRALTRKNGTSNHRAGAVMIVFSCLFIFSFAQTWGPAAYVIVGESYPIRYRSKCAAVATTSNWLWNFLISFFTPFITNSIGFKYGYIFASCNLCASIVTFLFAHESKGLTLEEINELYLSDAKPWMSRPKNLSEMAEAKEVEREETRPKGESARYLEHADSNSDSEDLSSSANNDVHEPVARQDPFNENEVEKSRTRPSQESYTTSSN

SEQ ID NO: 23599 - protein, 557 aa, Schizosaccharomyces pombe
MGRTLTSVLVVFISMAGWLGGADTGSISGILGMRDFQSRFADRYNPITNSYSYSAWRQALLTGTVNAGCLFGAMLSSPFTEAIGKKYSIAFFSGCYIIGQILLVTAVPSWVQIMVGKLFTGLTIGALSVLSPGYQSEVAPPQIRGAVVSTYQLFQTCGTLIAACINMGTHKLRKTASWRTSFGINILWGIFLMVGVLFLPESPRYLIYKGRDEEALRIMCQTAELDPESEIIQTNFNTIKSDIEMEMAGGKARWPEVFGKEVRYRTVLGFLTMLLRELIGNNYYFYYATQVFKGTGMTDIFLPAVILGAINFGTTFGALYTIDNLGRRNPLIFGAAFQSICFFIYAAVGDRKLIYKNGTSDHRAGAVMIVFSCLFLFSYCCSWGPMGWVIVGETFPIRYRSKCAAVATSGNWLGNFMVSFFTPFISNSIGFKLGYIYACINMTSAFQIFLMAKETKGLTLEEVNELYESDIKPWDSYKYVRQIESRRIHFSKEEEKREREKSKGYRGQEERFIENADGADNDDSSASSESFASAGAHSRSVFPRRSNVSEESHPTWV

SEQ ID NO: 23600 - protein, 519 aa, Schizosaccharomyces pombe
MLIFVSMAGWMFGADTRSIGGVTSMRDFRERYADRYDPITDQYSLSSARQGLLTGMVNVGSLFGCIISSPIADRFGKRLSIIGFCAVYIIGIIVQVTAVPSWVQIMVAKIWTGIGIGALSVLAPGYQSETAPPSIRGTVVVTYQLFVTGGIFIAACINMGTHKLHKTAQWRVSIGINLLWGIITMIGILFLPESPRYLIQVGKDEEAVRVLSESAELFPDSEEVQNEYHRLKSSIDEEFAGGPCSWASIFGKDIRYRTFLGMFVMSLQQLTGNNYFFYYGFSVMQGAGINSPYLSAMILDAVNFGCTFGGMYVLERFGRRNPLIIGGIWQSICFFIYSAVGSRALYHKNGTSNTRAGAVMIVMACLFIFGFAQTWAPAAYVIVGESYPVRYRSKCAAVATASNWLWNFLISFFTPFIQASIGFKYGYVFASCNLTGAIVIFLFAKETKGLTLEEINELYMSVIKPWESGNFKLNYSEQKKVEKEKSRKGGARGESVEYVERASNTDSSPQYSSHEEDYA

SEQ ID NO: 23601 - protein, 547 aa, Schizosaccharomyces pombe
MGKTLTIVMLVFVSMAGWMFGADTGSIGGITNMRDFQSRFADRYNPVTDTYSYSSARQGLITGMVNVGSMTGCILSSPLMDRIGKRVSIMFWTIVYLIGIILQVTAVPSWVQIMVAKIWTGLAIGALSVLAPGFQSEVAPATLRGTIVTTYQLAVTGGIFIAACINMGTHKLHKTAQWRVSMGINLLWGIIMFIGISFLPESPRYLIAIGKDEEALDIMCKNNVLPREHEIIQTEYHVIKTDCEAEMAGGPATWGDILGADIRYRTFLGLGVMSLQQLTGDNYYFYYGFEVFEGTGMNSPYLSALILDAVNFGCTFGGLFVLEFFGRRMPLIIGGVWQSITFFIYAAVGNRALTRKNGTSNHRAGAVMIVFSCLFIFSFAQTWGPAAYVIVGESYPIRYRSKCAAVATTGNWLWGFLITFFTPFISDSIGFKYGYIFAACNLCAACIIFLFAHETKGLTLEEINELYLSGAKPWMPRPENLGQAAKQQQEVLEKSRGVQGESAAHLENVDNEGMEDTSSNDITSSTSSSEGRAKPESNYVDEQDRYA

SEQ ID NO: 23602 - protein, 535 aa, Schizosaccharomyces pombe
MAKILTIVMLVFVSMAGWMFGADTGSIGGITNMRDFQSRYADRYDPVTDTYSYSSARQGLLVGMVNTGTTVGCLLSSPLGDRFGKRKCIMGWTLVYITGVIVQLTTIPSWVQMMVAKIWTGLGIGALSVIAPGYQSESSPPHIRGAIVTTYQLFITLGIFIAACINMGTHKYTTHPEAQWRVPIGINLLWGILMFFGMLFLPESPRYLAVKGRNEECMKILTRNAGLPADHPIMQKEYNAIQADVEAELAGGPCSWPQIFSNEIRYRTLLGMGVMAFQQLTGNNYFFYYGTQVFRGTGLNSPFLAALILDAVNFGCTFGAIFVLEYFGRRGPLIVGGVWQSICFFIYASVGDRALTRPNGTSNHRAGAVMIVFSCLFIFSFAQTWAPAAYVIVGESYPIRYRSKCAAVATASNWFWNFMISFFTPFISNSIGFKYGYVFAACNLCAAIIIFLFAKETKGLTLEEINQLYLSNIKPWNTGAYQRDREDIKQSDSEKERGPTSKLHEYVEHAPNSYASTHSTESENYPQQVTNPVGL

SEQ ID NO: 23603 - protein, 518 aa, Schizosaccharomyces pombe
MRDFQSRFADRYNQITNSYSYSSSRQGLITGMVNVGSFFGCLLSSPVADKIGKRLSIIVWTTVYLIGIIIQVTTVPSWVQILVAKIWTGLSIGALSVITPGYQSEVAPAIMRGAIVTTYQLFITLGIFIAACINMGTHKYSHGTTAQWRISIGINLLWGIITLVGIIFLPESPRYLIAIGKDDEALKIMCYNNDLPLEHEIIQTEYHTIKSDCDAELAGGPARWPEIFNANIRYRTFLGMAVMMFQQLTGANYYFYYGTQVFRGTGMDSPYLAALIPDAVNCGCTFGAIFVLEFFGRRSPLIVGGIWQYICFFIYAAVGDRALYHKNGTSNHRAGAVMIVFSCLFIFSFSQTWAPAAYVIVGESYPVRYRSKCAAVATSANWFWNFLISFFTPFITNSIGFKYGYIFASCNLTGAAIIFLFVHETKGRTLEEINTMYASNLKPWMPHPEGYREFGREQNNATLKSHIGLNGETTELIENTDNQGDSGSFQTSTPDDSRPEQNQASATYIRPDKREPRL

SEQ ID NO: 23604 - protein, 546 aa, Schizosaccharomyces pombe
MGKNLTIVMLVFVSMAGWMFGADTGSIGGITNMRDFQSRFADRYNPVTDSYSYSSARQGLITGMVNVGSFFGCFLSSPLMDRIGKRTSIMFWTIVYLIGIILQVTAVPSWVQIMVAKIWTGLSIGALSVLAPGFQSEVAPADLRGTIVTTYQLAVTGGIFIAACINMGTHKLHKTAQWRVSMGINLLWGIITFIGISFLPESPRYLISVGRDEEALQIMAKNNDLPIEHEVIQTEYHVIKSDCEAELAGGPATWPEIFGPDIRYRTFLGLGVMSLQQLTGDNYYFYYGFEVFEGTGMNSPYLSALILDAVNFGCTFGGLFVLEFFGRRMPLIIGALWQSITFFIYAAVGNRALTRKNGTSNHRAGAVMIVFSCLFIFSFAQTWGPAAYVIVGESYPIRYRSKCAAVATTGNWLWGFLISFFTPFITNSIGFKYGYIFAACNLCAACIIFLFAHETKGLTLEEINELYISGAKPWMPRPKNLGNFTKQQEEVREKSRGVQGESAAHLENVDGEEGIEDSSNDISSTTSSDGRAKPESSYHDQEEQFA

SEQ ID NO: 23605 - protein, 376 aa, Schizosaccharomyces pombe
IMAASRNVAMMVVGRFIVGYGIGLTSLIVPMYITELAPARLRGRLVIIYVVFITGGQLIAYSLNAAFEHVHQGWRIMFGIGAAPALGQLISLFWTPESPRYLLRHHHVEKVYKILSRIHPEAKPAEIAYKVSLIQEGVKVDFPEGNKFQHFFHSLKVLFTVPSNRRSLFIGCFLQWFQQFSGTNAIQYFSAIIFQSVGFKNSISVSMVVGATNFVFTIVAFMFIDRIGRRRILLCTSAVMIAGLALCAIAYHFLPADTTQNTHSGWQYVVIASIIIFLASYASGIGNIPWQQAELFPMEVRALGAGFSTAINWVGNLIISASFLTMMESITPTGTFALFAGFCFVGLVTSYFTYPELAGMFIENIHKLLEKGFWQA

SEQ ID NO: 23606 - protein, 509 aa, Pichia angusta
MVKLQSYYPLFRPGKPTQHILTVTCMFAFILYGFEQGALANVQNEVVFQSQFGHPQGNYLGIIVAIYNLGSFFGSMANIWIGDKLGRKRAIWLGFTLVTIGVILQCSSYSVVQLFIGRFISGLGTGFETSTTPMYQSEVCHENHRGGLVAAEPQGVAFGITVSYWIGYGCSKRTDQVSWRLPVGIQMLFAVLGIVMLFFCPESPRWLMKVGRTQDARYSLATINGVPEDHPRISAIIDDILYLQKIEGSGDKITWGDILMGRDAMHGRFRIMLTVFGQFWNQFGGINLVVYYVPMVLENNVGLSSNLATILGGCIMLTFFATGFIPTLFLDKMGRRFAMASGSAGQCISMLLVTILLRVGTKESSVAATAFFFTFIGFFGYAMNCVPWVYAAEVLPLQLRAKGNAISVATNWICNFVIAMITPIMTQNLAWKTYIVFTLTNAVATIHFFVFYPETSKRTLEDIENIFLDSHTIFYGLQEIKRTPTERLTEKLIDIEHVESVEEGSPESD

SEQ ID NO: 23607 - protein, 553 aa, Pichia stipitis
MSSQDIPSGVQTPSNASFLEKDEDKIEEVPQNHDATLVALESKGISEYLLICFFCLLVAFGGFVFGFDTGTISGFVNMSDFLERFGQTRADGTHYLSNVRVGLLVSIFNIGCAIGGIFLSKIGDVYGRRVGIMASMVIYVVGIIVQIASQHAWYQVMIGRAITGLAVGTVSVLSPLFIGESSPKHLRGTLVYCFQLCITLGIFIGYCVTYGTKRLSDSRQWRVPLGLCFLWAIFLVVGMLAMPESPRYLVEKKRIEDAKKSVARSNKLSPEDPSVYTEIQLIQAGIDREAIAGSASWTELITGKPAIFRRVVMGIIMQSLQQLTGVNYFFYYGTTIFQAVGLKDSFQTSIILGVVNFAATFIGIWAIERFGRRSCLLVGSAGMFVCFIIYSTIGSFHLYKDGEYNNDNTYKPSGNALIFITCLFIVFFASTWAGGVYTIISESYPLRIRSKAMAIATAANWVFGFLISFFTPFIVSAIHFKFGYVFSGCLLFSFFYVYFFVVETKGLSLEDVDELYASNVVPWKSSKWVPPSTAAMATEAGYAADEKPVDEHV

SEQ ID NO: 23608 - protein, 550 aa, Pichia stipitis
MSSQDLPSGAQTPIDGSSILEDKVEQSSSSNSQSDLASIPATGIKAYLLVCFFCMLVAFGGFVFGFDTGTISGFLNMSDFLSRFGQDGSEGKYLSDIRVGLIVSIFNIGCAIGGIFLSKIGDVYGRRIGIISAMVVYVVGIIIQISSQDKWYQLTIGRGVTGLAVGTVSVLSPMFISESAPKHLRGTLVYCYQLCITLGIFIGYCVTYGTKDLNDSRQWRVPLGLCFLWAIFLVVGMLAMPESPRFLIEKKRIEEAKKSLARSNKLSPEDPGVYTELQLIQAGIDREAAAGSASWMELITGKPAIFRRVIMGIILQSLQQLTGVNYFFYYGTTIFQAVGLQDSFQTSIILGTVNFLSTFVGIWAIERFGRRQCLLVGSAGMFVCFIIYSVIGTTHLFIDGVVDNDNTRQLSGNAMIFITCLFIFFFACTWAGGVFTIISESYPLRIRSKAMSIATAANWMWGFLISFCTPFIVNAINFKFGFVFTGCLLFSFFYVYFFVSETKGLSLEEVDELYAEGIAPWKSGAWVPPSAQQQMQNSTYGAEAKEQEQV

SEQ ID NO: 23609 - protein, 550 aa, Pichia stipitis
MSSQDLPSGAQTPIDGSSILEDKVEQSSSSNSQSDLASIPATGIKAYLLVCFFCMLVAFGGFVFGFDTGTISGFLNMSDFLSRFGQDGSEGKYLSDIRVGLIVSIFNIGCAIGGIFLSKIGDVYGRRIGIISAMVVYVVGIIIQISSQDKWYQLTIGRGVTGLAVGTVSVLSPMFISESAPKHLRGTLVYCYQLCITLGIFIGYCVTYGTKDLNDSRQWRVPLGLCFLWAIFLVVGMLAMPESPRFLIEKKRIEEAKKSLARSNKLSPEDPGVYTEVQLIQAGIDREAAAGSASWMELITGKPAIFRRVIMGIILQSLQQLTGVNYFFYYGTTIFQAVGLQDSFQTSIILGTVNFLSTFVGIWAIERFGRRQCLLVGSAGMFVCFIIYSVIGTTHLFIDGVVDNDNTRQLSGNAMIFITCLFIFFFACTWAGGVFTIISESYPLRIRSKAMSIATAANWMWGFLISFCTPFIVNAINFKFGFVFTGCLLFSFFYVYFFVSETKGLSLEEVDELYAEGIAPWKSGAWVPPSAQQQMQNSTYGAEAKEQEQV

SEQ ID NO: 23610 - protein, 570 aa, Saccharomyces cerevisiae
MNSTPDLISPQKSNSSNSYELESGRSKAMNTPEGKNESFHDNLSESQVQPAVAPPNTGKGVYVTVSICCVMVAFGGFIFGWDTGTISGFVAQTDFLRRFGMKHHDGSHYLSKVRTGLIVSIFNIGCAIGGIVLAKLGDMYGRRIGLIVVVVIYTIGIIIQIASINKWYQYFIGRIISGLGVGGITVLSPMLISEVAPSEMRGTLVSCYQVMITLGIFLGYCTNFGTKNYSNSVQWRVPLGLCFAWALFMIGGMMFVPESPRYLVEAGRIDEARASLAKVNKCPPDHPYIQYELETIEASVEEMRAAGTASWGELFTGKPAMFQRTMMGIMIQSLQQLTGDNYFFYYGTIVFQAVGLSDSFETSIVFGVVNFFSTCCSLYTVDRFGRRNCLMWGAVGMVCCYVVYASVGVTRLWPNGQDQPSSKGAGNCMIVFACFYIFCFATTWAPIAYVVISECFPLRVKSKCMSIASAANWIWGFLISFFTPFITGAINFYYGYVFMGCMVFAYFYVFFFVPETKGLSLEEVNDMYAEGVLPWKSASWVPVSKRGADYNADDLMHDDQPFYKSLFSRK

SEQ ID NO: 23611 - protein, 569 aa, Saccharomyces cerevisiae
MNSTPDLISPQKSNSSNSYELESGRSKAMNTPEGKNESFHDNLSESQVQPAVAPPNTGKGVYVTVSICCMVAFGGFIFGWDTGTISGFVAQTDFLRRFGMKHHDGSHYLSKVRTGLIVSIFNIGCAIGGIVLAKLGDMYGRRIGLIVVVVIYTIGIIIQIASINKWYQYFIGRIISGLGVGGITVLSPMLISEVAPSEMRGTLVSCYQVMITLGIFLGYCTNFGTKNYSNSVQWRVPLGLCFAWALFMIGGMMFVPESPRYLVEAGRIDEARASLAKVNKCPPDHPYIQYELETIEASVEEMRAAGTASWGELFTGKPAMFQRTMMGIMIQSLQQLTGDNYFFYYGTIVFQAVGLSDSFETSIVFGVVNFFSTCCSLYTVDRFGRRNCLMWGAVGMVCCYVVYASVGVTRLWPNGQDQPSSKGAGNCMIVFACFYIFCFATTWAPIAYVVISECFPLRVKSKCMSIATAANWIWGFLISFFTPFITGAINFYYGYVFMGCMVFAYFYVFFFVPETKGLSLEEVNDMYAEGVLPWKSASWVPVSKRGADYNADDLMHDDQPFYKSLFSRK

SEQ ID NO: 23612 - protein, 564 aa, Saccharomyces cerevisiae
MQSSTESDRDIQDGPDADIHVAPPVEKEWSDGFDDNEVINGDNVEPPKRGLIGYLVIYLLCYPISFGGFLPGWDSGITAGFINMDNFKMNFGSYKHSTGEYYLSNVRMGLLVAMFSIGCAIGGLIFARLADTLGRRLAIVIVVLVYMVGAIIQISSNHKWYQYFVGKIIYGLGAGGCSVLCPMLLSEIAPTDLRGGLVSLYQLNMTFGIFLGYCSVYGTRKYDNTAQWRVPLGLCFLWTLIIIIGMLLVPESPRYLIECERHEEARASIAKINKVSPEDPWVLKQADEINAGVLAQRELGEASWKELFSVKTKVLQRLITGILVQTFLQLTGENYFFFYGTTIFKSVGLTDGFETSIVLGTVNFFSTIIAVMVVDKIGRRKCLLFGAAGMMACMVIFASIGVKCLYPHGQDGPSSKGAGNAMIVFTCFYIFCFATTWAPVAYIVVAESFPSKVKSRAMSISTACNWLWQFLIGFFTPFITGSIHFYYGYVFVGCLVAMFLYVFFFLPETIGLSLEEIQLLYEEGIKPWKSASWVPPSRRGIPSEESKTEKKDWKKFLKFSKGSD

SEQ ID NO: 23613 - protein, 569 aa, Saccharomyces cerevisiae
MTDRKTNLPEEPIFEEAEDDGCPSIENSSHLSVPTVEENKDFSEYNGEEAEEVVVPEKPASAYATVSIMCLCMAFGGFMSGWDTGTISGFVNQTDFLRRFGNYSHSKNTYYLSNVRTGLIVSIFNVGSAIGCLFLSKLGDIYGRCMGLIIVIVVYMVGIVIQIASIDKWYQYFIGRIIAGIGAGSISVLAPMLISETAPKHIRGTLLACWQLMVTFAIFLGYCTNYGTKTYSNSVQWRVPLGLCFAWAIIMIGGMTFVPESPRFLVQVGKIEQAKASFAKSNKLSVDDPAVVAEIDLLVAGVEAEEAMGTASWKELFSRKTKVFQRLTMTVMINSLQQLTGDNYFFYYGTTIFKSVGMNDSFETSIVLGIVNFASCFFSLYSVDKLGRRRCLLLGAATMTACMVIYASVGVTRLYPNGKSEPSSKGAGNCTIVFTCFYIFCFSCTWGPVCYVIISETFPLRVRSKCMSVATAANLLWGFLIGFFTPFITSAINFYYGYVFMGCLAFSYFYVFFFVPETKGLTLEEVDEMWMDGVLPWKSESWVPASRRDGDYDNEKLQHDEKPFYKRMF

SEQ ID NO: 23614 - protein, 567 aa, Saccharomyces cerevisiae
MASEQSSPEINADNLNSSAADVHVQPPGEKEWSDGFYDKEVINGNTPDAPKRGFLGYLIIYLLCYPVSFGGFLPGWDSGITAGFINMDNFKMNFGSYKHSTGEYYLSNVRMGLLVAMFSVGCSIGGVAFARLADTLGRRLAIVIVVLVYMVGAIIQISSNHKWYQYFVGKIIYGLGAGGCSVLCPMLLSEIAPTDLRGGLVSLYQLNMTFGIFLGYCSVYGTRKYSNTAQWRIPVGLCFLWALIIIVGMLLVPESPRYLIECERHEEACVSIAKINKVSPEDPWVLKQADEINAGVLAQRELGEASWKELFSVKTKVLQRLITGILVQTFLQLTGENYFFFYGTTIFKSVGLTDGFETSIVLGTVNFFSTIIAVMVVDKIGRRKCLLFGAASMMACMVIFASIGVKCLYPHGQDGPSSKGAGNAMIVFTCFYIFCFATTWAPVAYIVVAESFPSKVKSKAMSISTAFNWLWQFLIGFFTPFITGSIHFYYGYVFVGCLVAMFLYVFFFLPETIGLSLEEIQLLYEEGIKPWKSASWVPPSRRGASSRETEAKKKSWKEVLKFPKSFN

SEQ ID NO: 23615 - protein, 567 aa, Saccharomyces cerevisiae
MASEQSSPEINADNLNSSAADVHVQPPGEKEWSDGFYDKEVINGNTPDAPKRGFLGYLIIYLLCYPVSFGGFLPGWDSGITAGFINMDNFKMNFGSYKHSTGEYYLSNVRMGLLVAMFSVGCSIGGVAFARLADTLGRRLAIVIVVLVYMVGAIIQISSNHKWYQYFVGKIIYGLGAGGCSVLCPMLLSEIAPTDLRGGLVSLYQLNMTFGIFLGYCSVYGTRKYSNTAQWRIPVGLCFLWALIIIVGMLLVPESPRYLIECERHEEACVSIAKIDKVSPEDPWVLKQADEINAGVLAQRELGEASWKELFSVKTKVLQRLITGILVQTFLQLTGENYFFFYGTTIFKSVGLTDGFETSIVLGTVNFFSTIIAVMVVDKIGRRKCLLFGAASMMACMVIFASIGVKCLYPHGQDGPSSKGAGNAMIVFTCFYIFCFATTWAPVAYIVVAESFPSKVKSKAMSISTAFNWLWQFLIGFFTPFITGSIHFYYGYVFVGCLVAMFLYVFFFLPETIGLSLEETQLLYEEGIKPWKSASWVPPSRRGASSRETEAKKKSWKEVLKFPKSFN

SEQ ID NO: 23616 - protein, 592 aa, Saccharomyces cerevisiae
MSELENAHQGPLEGSATVSTNSNSYNEKSGNSTAPGTAGYNDNLAQAKPVSSYISHEGPPKDELEELQKEVDKQLEKKSKSDLLFVSVCCLMVAFGGFVFGWDTGTISGFVRQTDFIRRFGSTRANGTTYLSDVRTGLMVSIFNIGCAIGGIVLSKLGDMYGRKIGLMTVVVIYSIGIIIQIASIDKWYQYFIGRIISGLGVGGITVLAPMLISEVSPKQLRGTLVSCYQLMITFGIFLGYCTNFGTKNYSNSVQWRVPLGLCFAWSIFMIVGMTFVPESPRYLVEVGKIEEAKRSLARANKTTEDSPLVTLEMENYQSSIEAERLAGSASWGELVTGKPQMFRRTLMGMMIQSLQQLTGDNYFFYYGTTIFQAVGLEDSFETAIVLGVVNFVSTFFSLYTVDRFGRRNCLLWGCVGMICCYVVYASVGVTRLWPNGQDQPSSKGAGNCMIVFACFYIFCFATTWAPVAYVLISESYPLRVRGKAMSIASACNWIWGFLISFFTPFITSAINFYYGYVFMGCMVFAYFYVFFFVPETKGLTLEEVNEMYEENVLPWKSTKWIPPSRRTTDYDLDATRNDPRPFYKRMFTKEK

SEQ ID NO: 23617 - protein, 546 aa, Saccharomyces cerevisiae
MVSSSVSILGTSAKASTSLSRKDEIKLTPETREASLDIPYKPIIAYWTVMGLCLMIAFGGFIFGWDTGTISGFINQTDFKRRFGELQRDGSFQLSDVRTGLIVGIFNIGCALGGLTLGRLGDIYGRKIGLMCVILVYVVGIVIQIASSDKWYQYFIGRIVSGMGVGGVAVLSPTLISEISPKHLRGTCVSFYQLMITLGIFLGYCTNYGTKKYSNSIQWRVPLGLCFAWAIFMVIGMVMVPESPRYLVEKGKYEEARRSLAKSNKVTVTDPGVVFEFDTIVANMELERAVGNASWHELFSNKGAILPRVIMGIVIQSLQQLTGCNYFFYYGTTIFNAVGMQDSFETSIVLGAVNFASTFVALYIVDKFGRRKCLLWGSASMAICFVIFATVGVTRLWPQGKDQPSSQSAGNVMIVFTCFFIFSFAITWAPIAYVIVAETYPLRVKNRAMAIAVGANWMWGFLIGFFTPFITRSIGFSYGYVFMGCLIFSYFYVFFFVCETKGLTLEEVNEMYEERIKPWKSGGWIPSSRRTPQPTSSTPLVIVDSK

SEQ ID NO: 23618 - protein, 560 aa, Saccharomyces cerevisiae
MSEEAAYQEDTAVQNTPADALSPVESDSNSALSTPSNKAERDDMKDFDENHEESNNYVEIPKKPASAYVTVSICCLMVAFGGFVFGWDTGTISGFVAQTDFIRRFGMKHHDGTYYLSKVRTGLIVSIFNIGCAIGGIILAKLGDMYGRKMGLIVVVVIYIIGIIIQIASINKWYQYFIGRIISGLGVGGIAVLSPMLISEVSPKHIRGTLVSCYQLMITLGIFLGYCTNYGTKTYTNSVQWRVPLGLGFAWALFMIGGMTFVPESPRYLVEVGKIEEAKRSIALSNKVSADDPAVMAEVEVVQATVEAEKLAGNASWGEIFSTKTKVFQRLIMGAMIQSLQQLTGDNYFFYYGTTVFTAVGLEDSFETSIVLGIVNFASTFVGIFLVERYGRRRCLLWGAASMTACMVVFASVGVTRLWPNGKKNGSSKGAGNCMIVFTCFYLFCFATTWAPIPFVVNSETFPLRVKSKCMAIAQACNWIWGFLIGFFTPFISGAIDFYYGYVFMGCLVFSYFYVFFFVPETKGLTLEEVNTLWEEGVLPWKSPSWFHQTREVLTTTLMI

SEQ ID NO: 23619 - protein, 576 aa, Saccharomyces cerevisiae
MSEEAAYQEDTAVQNTPADALSPVESDSNSALSTPSNKAERDDMKDFDENHEESNNYVEIPKKPASAYVTVSICCLMVAFGGFVFGWDTGTISGFVAQTDFIRRFGMKHHDGTYYLSKVRTGLIVSIFNIGCAIGGIILAKLGDMYGRKMGLIVVVVIYIIGIIIQIASINKWYQYFIGRIISGLGVGGIAVLSPMLISEVSPKHIRGTLVSCYQLMITLGIFLGYCTNYGTKTYTNSVQWRVPLGLGFAWALFMIGGMTFVPESPRYLVEVGKIEEAKRSIALSNKVSADDPAVMAEVEVVQATVEAEKLAGNASWGEIFSTKTKVFQRLIMGAMIQSLQQLTGDNYFFYYGTTVFTAVGLEDSFETSIVLGIVNFASTFVGIFLVERYGRRRCLLWGAASMTACMVVFASVGVTRLWPNGKKNGSSKGAGNCMIVFTCFYLFCFATTWAPIPFVVNSETFPLRVKSKCMAIAQACNWIWGFLIGFFTPFISGAIDFYYGYVFMGCLVFSYFYVFFFVPETKGLTLEEVNTLWEEGVLPWKSPSWVPPNKRGTDYNADDLMHDDQPFYKKMFGKK

SEQ ID NO: 23620 - protein, 570 aa, Saccharomyces cerevisiae
MSQDAAIAEQTPVEHLSAVDSASHSVLSTPSNKAERDEIKAYGEGEEHEPVVEIPKRPASAYVTVSIMCIMIAFGGFVFGWDTGTISGFINQTDFIRRFGMKHKDGTNYLSKVRTGLIVSIFNIGCAIGGIILSKLGDMYGRKVGLIVVVVIYIIGIIIQIASINKWYQYFIGRIISGLGVGGIAVLSPMLISEVSPKHLRGTLVSCYQLMITAGIFLGYCTNFGTKNYSNSVQWRVPLGLCFAWALFMIGGMTFVPESPRYLAEVGKIEEAKRSIAVSNKVAVDDPSVLAEIEAVLAGVEAEKLAGNASWGELFSSKTKVLQRLIMGAMIQSLQQLTGDNYFFYYGTTIFKAVGLSDSFETSIVLGIVNFASTFVGIYVVERYGRRTCLLWGAASMTACMVVYASVGVTRLWPNGQDQPSSKGAGNCMIVFACFYIFCFATTWAPIPYVVVSETFPLRVKSKAMSIATAANWLWGFLIGFFTPFITGAINFYYGYVFMGCLVFMFFYVLLVVPETKGLTLEEVNTMWEEGVLPWKSASWVPPSRRGANYDAEEMAHDDKPLYKRMFSTK

SEQ ID NO: 23621 - protein, 570 aa, Saccharomyces cerevisiae
MSQDAAIAEQTPVEHLSAVDSASHSVLSTPSNKAERDEIKAYGEGEEHEPVVEIPKRPASAYVTVSIMCIMIAFGGFVFGWDTGTISGFINQTDFIRRFGMKHKDGTNYLSKVRTGLIVSIFNIGCAIGGIILSKLGDMYGRKVGLIVVVVIYIIGIIIQIASINKWYQYFIGRIISGLGVGGIAVLSPMLISEVSPKHLRGTLVSCYQLMITAGIFLGYCTNFGTKNYSNSVQWRVPLGLCFAWALFMIGGMTFVPESPRYLAEVGKIEEAKRSIAVSNKVAVDDPSVLAEVEAVLAGVEAEKLAGNASWGELFSSKTKVLQRLIMGAMIQSLQQLTGDNYFFYYGTTIFKAVGLSDSFETSIVLGIVNFASTFVGIYVVERYGRRTCLLWGAASMTACMVVYASVGVTRLWPNGQDQPSSKGAGNCMIVFACFYIFCFATTWAPIPYVVVSETFPLRVKSKAMSIATAANWLWGFLIGFFTPFITGAINFYYGYVFMGCLVFMFFYVLLVVPETKGLTLEEVNTMWEEGVLPWKSASWVPPSRRGANYDAEEMTHDDKPLYKRMFSTK

SEQ ID NO: 23622 - protein, 570 aa, Saccharomyces cerevisiae
MSQDAAIAEQTPVEHLSAVDSASHSVLSTPSNKAERDEIKAYGEGEEHEPVVEIPKRPASAYVTVSIMCIMIAFGGFVFGWDTGTISGFINQTDFIRRFGMKHKDGTNYLSKVRTGLIVSIFNIGCAIGGIILSKLGDMYGRKVGLIVVVVIYIIGIIIQIASINKWYQYFIGRIISGLGVGGIAVLSPMLISEVSPKHLRGTLVSCYQLMITAGIFLGYCTNFGTKNYSNSVQWRVPLGLCFAWALFMIGGMTFVPESPRYLAEVGKIEEAKRSIAVSNKVAVDDPSVLAEVEAVLAGVEAEKLAGNASWGELFSSKTKVLQRLIMGAMIQSLQQLTGDNYFFYYGTTIFKAVGLSDSFETSIVLGIVNFASTFVGIYVVERYGRRTCLLWGAASMTACMVVYASVGVTRLWPNGQDQPSSKGAGNCMIVFACFYIFCFATTWAPIPYVVVSETFPLRVKSKAMSIATAANWLWGFLIGFFTPFITGAINFYYGYVFMGCLVFMFFYVLLVVPETKGLTLEEVNTMWEEGVLPWKSASWVPPSRRGANYDAEEMAHDDKPLYKRMFSTK

SEQ ID NO: 23623 - protein, 541 aa, Saccharomyces cerevisiae
MSEFATSRVESGSQQTSIHSTPIVQKLETDESPIQTKSEYTNAELPAKPIAAYWTVICLCLMIAFGGFVFGWDTGTISGFVNQTDFKRRFGQMKSDGTYYLSDVRTGLIVGIFNIGCAFGGLTLGRLGDMYGRRIGLMCVVLVYIVGIVIQIASSDKWYQYFIGRIISGMGVGGIAVLSPTLISETAPKHIRGTCVSFYQLMITLGIFLGYCTNYGTKDYSNSVQWRVPLGLNFAFAIFMIAGMLMVPESPRFLVEKGRYEDAKRSLAKSNKVTIEDPSIVAEMDTIMANVETERLAGNASWGELFSNKGAILPRVIMGIMIQSLQQLTGNNYFFYYGTTIFNAVGMKDSFQTSIVLGIVNFASTFVALYTVDKFGRRKCLLGGSASMAICFVIFSTVGVTSLYPNGKDQPSSKAAGNVMIVFTCLFIFFFAISWAPIAYVIVAESYPLRVKNRAMAIAVGANWIWGFLIGFFTPFITSAIGFSYGYVFMGCLVFSFFYVFFFVCETKGLTLEEVNEMYVEGVKPWKSGSWISKEKRVSEE

SEQ ID NO: 23624 - protein, 532 aa, Aspergillus oryzae
MVAGGGVVSSSGMDAYRALPNNTNSNWFKDKGLRRLNFGLMLMFASAAANGYDGALMNGLLTLPMCKFPLSSCPHLWRMFTFIPASYFADYFGRKMSVALGSAIMIVASVIQAATVGRWAFFGTRIAMGIGLGFAQTAAPPLTTEIAHPRHRGVVTAIFQATWYWGAILAAAVCLGTFYVEGSTWSWRIPCLLQCFFPAVQLVGLLIVPESPRWLVSKDRRDEALQILARYHGNCDTSDPLVQFEFSEICSAIELENSVAHKSGWSAFIATKGARHRLAICLLVGVMIQWAGNGTYRAIHLLLSILLIILSLGVISYYLAPILRSVGITNPTQQSAINLGLQAWNAVCAAGGAVAAEKYGRRPLWMLSTVLMLLFFTLATVLSAVFDESAIKAAGSAVVAFLYLFYGAYDIAYTPLSIAYPVEIMPFYLRTKGLSLSLTAQFGAGFFNQFVNPIALGAIKWKFYFVYLGLLVIFLGIIYFVFPETKGHTLEEIAVIFDGPGAETEVQRDLAAIIAVEREVKAPMKEELEHAP

SEQ ID NO: 23625 - protein, 531 aa, Aspergillus parasiticus
MAVLHSGVVCLDGWFYLRLLHRYVNFPVGYLPCFVLTFTSGQIAGFTTMNDFKMRFAEQHADGTYAFSNVRNGLIVGLLSIGTMIGALVAAPIADRIGRKYSISFWSVIHMVGIIIQIATDDNWVQVAMGRWVAGLVVGALSSIVPMYQSESAPRQVRGAMVSAFQLFVASVFSSLISSTSVPNPSTVPLPGVSLWDMCAWPLILGVGTLFLPESPRYAYRNGRVEEAREVMCKLYGVGPNHRCIAQEMKDMKDKLDEEKAAGQAWHFEVFTGPRMFYRVAGIALQSLQQLTGANFLFYYGNTIFTSTGLNNSYVTQIILGAVNFGMTLPGLYVVEHFGRRNSLMVGASWMFICFMIWASIGHFALDLENPPNTPQAGTAMIVFTCFFIGGFATTWGPIVWAICGEMYPARYRAVCIGLATAANWSLNFLISFFNPIHLQRYRLCYGYVFAGCCFAAVLVVFFFVNETQGRTLEEVDTMYVLHVKPWKSASWTPRRVSSVISTDPPLPPSRRVGLSTASPPPRSASKWYHV

SEQ ID NO: 23626 - protein, 513 aa, Aspergillus parasiticus
MVAGGGIVSSSGMDAYRALPNNTNSNWFKDKGLRRLNFGLMLMFASAAANGYDGALMNGLLTLPMCEFPLSSCPHLWRMFTFIPASYFADYFGRKMSVALGSAIMIVASVIQAATVGRWAFFGTRIAMGIGLGFAQTAAPPLTTEIAHPRHRGVVTAIFQATWYWGAILAAAVCLATLYVEGSTWSWRIPCLVQCFFPAVQLLGLLIVPESPRWLVSKDRRDEALQILARYHGNCDTSDPLVQFEFSEICSAIELENSVAHKSGWSAFIATKGARHRLAICLLVGVMIQWAGNGVISYYLAPILRSVGITNPTQQSAINLGLQAWNAVCAAGGAVAAEKYGRRPLWMLSTVLMLLFFTLATVLSAVFDESAIKAAGSAVVAFLYLFYGAYDIAYTPLSIAYPVEIMPFYLRTKGLSLSLTAQFGAGFFNQFVNPIALGAIKWKFYFVYLGLLVIFLGIVYFVFPETKGHTLEEIAVIFDGPGAETEVQRDLAAIIAVEREVKAPMKEELEHAP

SEQ ID NO: 23627 - protein, 489 aa, Citrus unshiu
MWGRQREASMMYKRTSSRDRSSTFDVEETTALVQNGTEVENTNPSWKLSFPHVLVATLSSFLFGYHLGVVNEPLESISLDLGFNGNTLAEGLVVSMCLGGAFIGSTLSGWIADGVGRRRAFQLCALPMIIGASISATTRNLIGMLLGRFVVGTGMGLGPTVAALYVTEVSPPFVRGTYGAFIQIATCLGLMGSLLIGIPVKEIAGWWRICFWVSIVPAAILCLAMVFCAESPHWLYKKGRTAEAEAEFEKLLGGSHVKSSLAELSKLDRGDDGDIVKFEELLYGRHFRVVFIGSTLFALQQLSGINAIFYFSSSVFKSAGLSSGLANVFVGIANLLGSVVAMVLMDKLGRKALLQWSFFSMAVSMAIQVAASSSYIPGSASLYLSVGGMLMFVLTFALGAGPVPSLLLPEIFPSRIRAKAMAVCMSVHWVINFFVGLLFLRLLEQLGPQLLYSIFGTFCLMAVAFVKRNVVETKGKSLQEIEIALLPQE

SEQ ID NO: 23628 - protein, 445 aa, Escherichia coli
MNTSPVRMDDLPLNRFHCRIAALTFGAHLTDGYVLGVIGYAIIQLTPAMQLTPFMAGMIGGSALLGLFLGSLVLGWISDHIGRQKIFTFSFLLITLASFLQFFATTPEHLIGLRILIGIGLGGDYSVGHTLLAEFSPRRHRGILLGAFSVVWTVGYVLASIAGHHFISENPEAWRWLLASAALPALLITLLRWGTPESPRWLLRQGRFAEAHAIVHRYFGPHVLLGDEVVTATHKHIKTLFSSRYWRRTAFNSVFFVCLVIPWFVIYTWLPTIAQTIGLEDALTASLMLNALLIVGALLGLVLTHLLAHRKFLLGSFLLLAATLVVMACLPSGSSLTLLLFVLFSTTISAVSNLVGILPAESFPTDIRSLGVGFATAMSRLGAAVSTGLLPWVLAQWGMQVTLLLLATVLLVGFVVTWLWAPETKALPLVAAGNVGGANEHSVSV

SEQ ID NO: 23629 - protein, 558 aa, Leishmania donovani
MTLKKRSSAPELPTSLDEDEEEDSPQPLSNTPFFSMKNLIVATPIILTPLLYGYNLGFVGPYSTMYGYASNCQLYSAKKSCETLTAAKCRWFNASTYVSNTTYGEVCGWADRTTCFLKYSDEAGCLSDSACKWSYSANTCGNQVGYSSIQSGVFAGSLVIGSTMGALMGGYLTKRLDYCKSFLFIGLLSVIGNVLTHVATGLFHYWVLFVARIVLGFPLGWQSITSSHYTDKFAPANHAKTLGTLFQVSVSTGIFVTSFFGLVLGNTIQYDAASNANTMGRMQGLVSVSTLLSIFVVFLPLITKDGYSKSRRGDYEGENSEDASRKAAEEYTMTQMIGPILNGVAMGCVTQLTGINANMNFAPTIMSNLGLQPLVGNIIVMAWNMLATFCVIPLSRRFSMRTLFLFCGFVGSLCCVFLGGIPVYPGVTKSDKAISGIAITGIAIFIALYEMGVGPCFYVLAVDVFPESFRPIGSSITVGVMFIFNLIINICYPIATEGISGGPSGNPNKGQAVAFIFFGCIGVVACVIEYFFLQPWVEPEAKMTDDLDGAAVPEGKHD

SEQ ID NO: 23630 - protein, 627 aa, Leishmania donovani
MGSPNDKEEEGTREPFHSLEVRGQVPAASALTSMISTNMSPKEQLSNGKSITQANADLPLISAAADSPSMTLKKRSSAPELPTSLDEDEEEDSPQPLSNTPFFSMKNLIVATPIILTPLLYGYNLGFVGPYSTMYGYASNCQLYSAKKSCETLTAAKCRWFNASTYVSNTTYGEVCGWADRTTCFLKYSDEAGCLSDSACKWSYSANTCGNQVGYSSIQSGVFAGSLVIGSTMGALMGGYLTKRLDYCKSFLFIGLLSVIGNVLTHVATGLFHYWVLFVARIVLGFPLGWQSITSSHYTDKFAPANHAKTLGTLFQVSVSTGIFVTSFFGLVLGNTIQYDAASNANTMGRMQGLVSVSTLLSIFVVFLPLITKDGYSKSRRGDYEGENSEDASRKAAEEYTMTQMIGPILNGVAMGCVTQLTGINANMNFAPTIMSNLGLQPLVGNIIVMAWNMLATFCVIPLSRRFSMRTLFLFCGFVGSLCCVFLGGIPVYPGVTKSDKAISGIAITGIAIFIALYEMGVGPCFYVLAVDVFPESFRPIGSSITVGVMFIFNLIINICYPIATEGISGGPSGNPNKGQAVAFIFFGCIGVVACVIEYFFLQPWVEPEAKMTDDLDGAAVPEGKHD

SEQ ID NO: 23631 - protein, 472 aa, Klebsiella oxytoca
MTTLSHDSTTMPRTQRDTRRMNQFVSIAAAVAGLLFGLDIGVIAGALPFITDHFVLSSRLQEWVVSSMMLGAAIGALFNGWLSFRLGRKYSLMVGAVLFVAGSVGSAFATSVEMLLVARIVLGVAVGIASYTAPLYLSEMASENVRGKMISMYQLMVTLGIVMAFLSDTAFSYSGNWRAMLGVLALPAVVLIILVIFLPNSPRWLAEKGRHVEAEEVLRMLRDTSEKARDELNEIRESLKLKQGGWALFKVNRNVRRAVFLGMLLQAMQQFTGMNIIMYYAPRIFKMAGFTTTEQQMVATLVVGLTFMFATFIAVFTVDKAGRKPALKIGFSVMAIGTLVLGYCLMQFDNGTASSGLSWLSVGMTMMCIAGYAMSAAPVVWILCSEIQPLKCRDFGITCSTTTNWVSNMIIGATFLTLLDAIGAAGTFWLYTALNVAFIGVTFWLIPETKNVTLEHIERRLMSGEKLRNIGN

SEQ ID NO: 23632 - protein, 492 aa, Schistosoma mansoni
MRQLKFFLPYCIITLGSSFPFGYHTGVINAPADLIKSFINTTLAARSVTCDERFIDLLWSLCVTSFLLGGFFGGLIGGVLANKLGRKNSLFLLSIPTVIGSLLMMFSKMAQSFEMIIIGRFTIGIACGAHTVVGPMFLSEIAPVNFRGAAGTFNQFVIVSAILLSQVLSLPEVMGTTELWPYLLALCTVSSVIHILLLFTCPESPTYLYIIKGDRRRSENALVYLRGQDCDVHAELELLKLETEQSSTHKSNVCDLLRIPYLRWGLIVALVPHIGQQFSGINGILYYFVSLFISNGLTKQVASYANLGTGVTILIGAFASIFVIDRKGRRPLLMFGTSVCLFSLLLFTLTLIIKQVTEINKLTILSIVLTYTFLFGFSVSLGSIPWFLVSELFTQENRDAAVSIAAATNWLCNAIVALIFPQLVIYIGIYAFIPFICALLVVLIFVGLYLPETKGKTPASIEDYFMRVCGFRGTEAHENPTFTDIIDDTTQY

SEQ ID NO: 23633 - protein, 489 aa, Schistosoma mansoni
MRQLKFFLPYCIITLGSSFPFGYHTGVINAPADLIKSFINTTLAARSVTCDERFIDLLWSLCVTSFLLGGFFGGLIGGVLANKLGRKNSLFLLSIPTVIGSLLMMFSKMAQSFEMIIIGRFTIGIACGAHTVVGPMFLSEIAPVNFRGAAGTFNQFVIVSAILLSQVLSLPEVMGTTELWPYLLALCTVSSVIHILLLFTCPESPTYLYIIKGDRRRSENALVYLRGQDCDVHAELELLKLETEQSSTHKSNVCDLLRIPYLRWGLIVALVPHIGQQFSGINGILYYFVSLFISNGLTKQVASYANLGTGVTILIGAFASIFVIDRKGRRPLLMFGTSVCLFSLLLFTLTLIIKQVTEINKLTILSIVLTYTFLFGFSVSIPWFLVSELFTQENRDAAVSIAAATNWLCNAIVALIFPQLVIYIGIYAFIPFICALLVVLIFVGLYLPETKGKTPASIEDYFMRVCGFRGTEAHENPTFTDIIDDTTQY

SEQ ID NO: 23634 - protein, 492 aa, Bos taurus
MEPTSKKLTGRLMLAVGGAVLGSLQFGYNTGVINAPQKVIEEFYNQTWVQRYGEPIPPATLTTLWSLSVAIFSVGGMIGSFSVGLFVNRFGRRNSMLMMNLLAFVSAVLMGFSKLGKSFEMLILGRFIIGVYCGLTTGFVPMYVGEVSPTELRGALGTLHQLGIVVGILIAQVFGLDSIMGNQELWPLLLSVIFIPALLQCILLPFCPESPRFLLINRNEENRAKSVLKKLRGTADVTRDLQEMKEESRQMMREKKVTILELFRSAAYRQPILIAVVLQLSQQLSGINAVFYYSTSIFEKAGVQQPVYATIGSGIVNTAFTVVSLFVVERAGRRTLHLIGLAGMAGCAVLMTIALALLERLPWMSYLSIVAIFGFVAFFEVGPGPIPWFIVAELFSQGPRPAAIAVAGFSNWTSNFIVGMCFQYVEQLCGPYVFIIFTVLLVLFFIFTYFKVPETKGRTFDEIASGFRQGGASQSDKTPEELFHPLGADSQV

SEQ ID NO: 23635 - protein, 509 aa, Bos taurus
MPSGFQQIGSEDGEPPRQRVTGTLVLGVFSAVLGSLQFGYNIGVINAPQKVIEQSYNETWLGRQGPEGPGSIPPGTLTTLWALSVAIFSVGGMISSFLIGIISQWLGRKRAMLFSNALAVLGGTLMGLAKAAASYEMLILGRFFIGAYSGLTSGLVPMYVGEIAPTHLRGALGTLNQLAIVTGILIAQVLGLESMLGTATLWPLLLGITVLPALLQMVLLPLCPESPRYLYIIRNLEGPARKSLKRLTGWADVSEVLAELKEEKRKLERERSLSLLQLLGSHTHRQPLVIAIVLQLSQQLSGINAVFYYSTSIFESAGVEKPAYATIGAGVVNTVFTLVSVFLVERAGHRTLHLLGLAGMCACAILMTVALLLLERVPAMSYVSIVAIFGFVAFFEIGPGPIPCFIVAELFSQGPRPAAMAVAGFSNWTCNFIIGMGFQYVADAMGPYVFLLFAVLLLGFFIFTFLKVPETRGRTFDQISAVFHRTPSLLEQEVKPSTELEYLGPDEHD

SEQ ID NO: 23636 - protein, 509 aa, Bos taurus
MPSGFQQIGSEDGEPPRQRVTGTLVLGVFSAVLGSLQFGYNIGVINAPQKVIEQSYNETWLGRQGPEGPGSIPPGTLTTLWALSVAIFSVGGMISSFLIGIISQWLGRKRAMLFNNALAVLGGTLMGLAKAAASYEMLILGRFFIGAYSGLTSGLVPMYVGEIAPTHLRGALGTLNQLAIVTGILIAQVLGLESMLGTATLWPLLLGITVLPALLQMVLLPLCPESPRYLYIIRNLEGPARKSLKRLTGWADVSEVLAELKEEKRKLERERSLSLLQLLGSHTHRQPLVIAIVLQLSQQLSGINAVFYYSTSIFESAGVEKPAYATIGAGVVNTVFTLVSVFLVERAGHRTLHLLGLAGMCACAILMTVALLLLERVPAMSYVSIVAIFGFVAFFEIGPGPIPCFIVAELFSQGPRPAAMAVAGFSNWTCNFIIGMGFQYVADAMGPYVFLLFAVLLLGFFIFTFLKVPETRGRTFDQISAVFHRTPSLLEQEVKPSTELEYLGPDEHD

SEQ ID NO: 23637 - protein, 477 aa, Salmonella typhimurium LT2
MSTSDSCYNTGYILRICAIAALGGILFGYDTAVISGAIGSLTSYFHLSPAETGWAVSCVVVGCVIGSFSAGYLSKRFGRKKSLMVSALLFTISAVGTSLSYTFTHFVIYRIIGGLAVGLAATVSPMYMSEVSPKNMRGRALSMQQFAIVFGQILIFYVNYKIASIAADTWLIELGWRYMFAAGIIPCILFCILVFLIPESPRWMMMIGREEETLKILTKISNEEHARHLLADIKTSLQNDQLNAHQKLNYRDGNVRFILILGCMIAMLQQVTGVNVMMYYAPIVLKDVTGSAQEALFQTIWIGVIQLIGSIIGAMIMDKMGRLSLMRKGTIGSIIGLLLTSWALYSQATGYFALFGMLFFMIFYALSWGVGAWVLISEIFPNRMRSQGMSISVGFMWMANFLVSQFFPMINENPYLLSHFHGAFPMWIFAICCIFSYFFICRYLPETKGISLEKMESVVLAKRRKKLQPIQTERYSD

SEQ ID NO: 23638 - protein, 478 aa, Salmonella typhimurium LT2
MSQRSKYNSAYVYVLCCIAALAGLMFGYSTAVITGVVLPLQQYYQLTPTETGWAVSSIVIGCIIGALVGGKIADKLGRKPALLIIAIIFIASSLGAAMSESFMIFSLSRIVCGFAVGMAGTASTMYMSELAPAEIRGKALGIYNISVVSGQVIVFIVNYLIAKGMPADVLVSQGWKTMLFAQVVPSIAMLAITLFLPESPAWCARNNRSEARSIKVLTRIYSGLTATDVAAIFDSMKETVRSQDNVAGGERTNLKSSPVLRYILLVGCCIAVLQQFTGVNVMNYYAPLVLQNSSTEVVMFQTIFIAVCNVVGSFIGMILFDRYGRIPIMKIGTIGSIVGLLIASYGLYTHDTGYITIFGILFFMLLFAVSWSVGAWVLISEVFPEKIKGFGMGLAVSLMWIANFLISLLFPVINDNAWLQETFGGAFSMWIFVVFNLVCYVFISRYVPETKGVPLTEIERLAENKLREIQGKRRDVIA

SEQ ID NO: 23639 - protein, 494 aa, Ovis aries
MGTTKVTTPLIFAISIATIGSFQFGYNTGVINAPEAIIKDFLNYTLEERSETPPSSVLLTSLWSLSVAIFSVGGMIGSFSVGLFVNRFGRRNSMLIVNLLAIAGGCLMGFCKIAESVEMLILGRLIIGLFCGLCTGFVPMYIGEISPTALRGAFGTLNQLGIVIGILVAQIFGLKVILGTEDLWPLLLGFTILPAIIQCAALPFCPESPRFLLINRKEEEKAKEILQRLWGTEDVAQDIQEMKDESMRMSQEKQVTVLELFRAPNYRQPIIISIMLQLSQQLSGINAVFYYSTGIFKDAGVQEPVYATIGAGVVNTIFTVVSVFLVERAGRRTLHLIGLGGMAFCSILMTISLLLKDNYSWMSFICIGAILVFVAFFEIGPGPIPWFIVAELFGQGPRPAAMAVAGCSNWTSNFLVGLLFPSATFYLGAYVFIVFTVFLVIFWVFTFFKVPETRGRTFEEITRAFEGQVQTGTRGEKGPIMEMNSIQPTKDTNA

SEQ ID NO: 23640 - protein, 390 aa, Ovis aries
AFVSAVLMGFSKLGKSFEMLILGRFIIGVYCGLTTGFVPMYVGEVSPTELRGALGTLHQLGIVVGILIAQVFGLDSIMGNQELWPLLLSVIFIPALLQCILLPFCPESPRFLLINRNEENRAKSVLKKLRGTADVTRDLQEMKEESRQMMREKKVTILELFRSAAYRQPILIAVVLQLSQQLSGINAVFYYSTSIFEKAGVQQPVYATIGSGIVNTAFTVVSLFVVERAGRRTLHLIGLAGMAGCAVLMTIALALLEQLPWMSYLSIVAIFGFVAFFEVGPGPIPWFIVAELFSQGPRPAAIAVAGFSNWTSNFIVGMCFQYVEQLCGPYVFIIFTVLLVLFFIFTYFKVPETKGRTFDEIASGFRQGGASQSDKTPEELFHPLGADSQV

SEQ ID NO: 23641 - protein, 492 aa, Oryctolagus cuniculus
MEPSSKKVTGRLMLAVGGAVLGSLQFGYNTGVINAPQKVIEEFYNQTWIHRYGERILPTTLTTLWSLSVAIFSVGGMIGSFSVGLFVNRFGRRNSMLMMNLLAFVSAVLMGFSKLAKSFEMLILGRFIIGVYCGLTTGFVPMYVGEVSPTALRGALGTLHQLGIVVGILIAQVFGLDSIMGNEDLWPLLLSVIFVPALLQCIVLPLCPESPRFLLINRNEENRAKSVLKKLRGNADVTRDLQEMKEESRQMMREKKVTILELFRSPAYRQPILSAVVLQLSQQLSGINAVFYYSTSIFEKAGVQQPVYATIGSGIVNTAFTVVSLFVVERAGRRTLHLIGLAGMAACAVLMTIALALLEQLPWMSYLSIVAIFGFVAFFEVGPGPIPWFIVAELFSQGPRPAAVAVAGFSNWTSNFIVGMCFQYVEQLCGPYVFIIFTVLLVLFFIFTYFKVPETKGRTFDEIASGFRQGGASQSDKTPEELFHPLGADSQV

SEQ ID NO: 23642 - protein, 400 aa, Oryctolagus cuniculus
  unsure (1)..(400): unsure at all Xaa locations
NLLAIIAGCLMGFAKIAESVEMLILGRLLIGIFCGLCTGFVPMYIGEVSPTALRGAFGTLNQLGIVIGILVAQIFGLEIILGSEVLWPVLLGFTIIPAILQSAALPFCPESPRFLLINKEEDEAKQILQILQRLWGTQDVAQDIQEMKEESARMRQEKQVTVLELFRAPSYRQPIIISIVLQLSQQLSGINAVFYYSTGIFKDAGVREPIYATIGAGVVNTIFTIVSVFLVERAGRRTLHLIGLGGMALCSVLMTVSLLLKXKYDTMSLVCIAAILIYAAFFEIGPGPIPWLIVTGLFSQDPRPAAMAVAGCSNWTSNFLVGLLFPSAAYYLGAYVFVIFAVFLVAFFIFTFFKVPETRGRTFEDITRAFEGQAAEANKLGKGPTMEMNSIQPIETTTHV

SEQ ID NO: 23643 - protein, 487 aa, Oryctolagus cuniculus
MEQEGQEKKKEGRLTLVLALRTLIAAFGSSFQYAYNVSVCNSPSELMTEFYNDTYYDRTGELIDEFPLTLLWSVTVSMFPSGGFAGSLLVGPLVNKFGRKGALLFNNIFSIVPAILMGCSKVARSFELIIISRLLVGICAGVSSNVVPMYLGELAPKNLRGALGVESQLFITLGILVAQIFGLRSIRQQKGWPILLGLTGGPAAAACPPFFPESPRYLLIGQEPRCRQKALQSLRGWDSVDRELEEIRREDEAARAAGLVSVRALCAMRGLAWQLISVVPLMWQQLSGVNAIYYYDQIYLSPLDTDTQYYTAATGAVNVLMTVCTVFVVESWARLLLLLGFSPLAPTCCVLTAALALQDTVSWMPYISIVCIIVYVIGHAIGPAIRSLYTEIFLQSGRPPTWWGQVHWLSNFTVGLVFPLIQWALGLYSFIIFGVACLSTTVYTFLIVPETKGKSFIEIIRRFIRMNKVEVSPDREELKDFPPDVSE

SEQ ID NO: 23644 - protein, 486 aa, Oryctolagus cuniculus
MEQEGQEKKKEGRLTLVLALRTLIAAFGSSFQYAYNVSVCNSPSELMTEFYNDTYYDRTGELIDEFPLTLLWSVTVSMFPSGGFAGSLLVGPLVNKFGRKGALLFNNIFSIVPAILMGCSKVARSFELIIISRLLVGICAGVSSNVVPMYLGELAPKNLRGALGVESQLFITLGILVAQIFGLRSIRQQKGWPILLGLTGGPAAAACPPFFPESPRYLLIGQEPRCRQKALQSLRGWDSVDRELEEIRREDEAARAAGLVSVRALCAMRGLAWQLISVVPLMWQQLSGVNAIYYYDQIYLSPLDTDTQYYTAATGAVNVLMTVCTVFVVESWARLLLLLGFSPLAPTCCVLTAALALQDTVSWMPYISIVCIIVYVIGHAIGPAIRSLYTEIFLQSGRPPTWWGQVHWLSNFTVGLVFPLIQWAGLYSFIIFGVACLSTTVYTFLIVPETKGKSFIEIIRRFIRMNKVEVSPDREELKDFPPDVSE

SEQ ID NO: 23645 - protein, 477 aa, Mus musculus
MSPEDPQETQPLLRPPEARTPRGRRVFLASFAAALGPLSFGFALGYSSPAIPSLRRTAPPALRLGDNAASWFGAVVTLGAAAGGILGGWLLDRAGRKLSLLLCTVPFVTGFAVITAARDVWMLLGGRLLTGLACGVASLVAPVYISEIAYPAVRGLLGSCVQLMVVTGILLAYVAGWVLEWRWLAVLGCVPPTLMLLLMCYMPETPRFLLTQHQYQEAMAALRFLWGSEEGWEEPPVGAEHQGFQLALLRRPGIYKPLIIGISLMVFQQLSGVNAIMFYANSIFEEAKFKDSSLASVTVGIIQVLFTAVAALIMDRAGRRLLLALSGVIMVFSMSAFGTYFKLTQSLPSNSSHVGLVPIAAEPVDVQVGLAWLAVGSMCLFIAGFAVGWGPIPWLLMSEIFPLHVKGVATGICVLTNWFMAFLVTKEFSSVMEMLRPYGAFWLTAAFCALSVLFTLTVVPETKGRTLEQVTAHFEGR

SEQ ID NO: 23646 - protein, 477 aa, Mus musculus
MSPEDPQETQPLLRPPEARTPRGRRVFLASFAAALGPLSFGFALGYSSPAIPSLRRTAPPALRLGDNAASWFGAVVTLGAAAGGILGGWLLDRSGRKLSLLLCTVPFVTGFAVITAARDVWMLLGGRLLTGLACGVASLVAPVYISEIAYPAVRGLLGSCVQLMVVTGILLAYVAGWVLEWRWLAVLGCVPPTLMLLLMCYMPETPRFLLTQHQYQEAMAALRFLWGSEEGWEEPPVGAEHQGFQLALLRRPGIYKPLIIGISLMVFQQLSGVNAIMFYANSIFEEAKFKDSSLASVTVGIIQVLFTAVAALIMDRAGRRLLLALSGVIMVFSMSAFGTYFKLTQSLPSNSSHVGLVPIAAEPVDVQVGLAWLAVGSMCLFIAGFAVGWGPIPWLLMSEIFPLHVKGVATGICVLTNWFMAFLVTKEFSSVMEMLRPYGAFWLTAAFCALSVLFTLTVVPETKGRTLEQVTAHFEGR

SEQ ID NO: 23647 - protein, 477 aa, Mus musculus
MSPEDPQETQPLLRPPEARTPRGRRVFLASFAAALGPLNFGFALGYSSPAIPSLRRTAPPALRLGDNAASWFGAVVTLGAAAGGILGGWLLDRSGRKLSLLLCTVPFVTGFAVITAARDVWMLLGGRLLTGLACGVASLVAPVYISEIAYPAVRGLLGSCVQLMVVTGILLAYVAGWVLEWRWLAVLGCVPPTLMLLLMCYMPETPRFLLTQHQYQEAMAALRFLWGSEEGWEEPPVGAEHQGFQLALLRRPGIYKPLIIGISLMVFQQLSGVNAIMFYANSIFEEAKFKDSSLASVTVGIIQVLFTAVAALIMDRAGRRLLLALSGVIMVFSMSAFGTYFKLTQSLPSNSSHVGLVPIAAEPVDVQVGLAWLAVGSMCLFIAGFAVGWGPIPWLLMSEIFPLHVKGVATGICVLTNWFMAFLVTKEFNSVMEMLRPYGAFWLTAAFCALSVLFTLTVVPETKGRTLEQVTAHFEGR

SEQ ID NO: 23648 - protein, 493 aa, Mus musculus
MGTTKVTPSLVFAVTVATIGSFQFGYNTGVINAPETILKDFLNYTLEERLEDLPSEGLLTALWSLCVAIFSVGGMIGSFSVGLFVNRFGRRNSMLLVNLLAIIAGCLMGFAKIAESVEMLILGRLLIGIFCGLCTGFVPMYIGEVSPTALRGAFGTLNQLGIVVGILVAQIFGLDFILGSEELWPGLLGLTIIPAILQSAALPFCPESPRFLLINKKEEDQATEILQRLWGTSDVVQEIQEMKDESVRMSQEKQVTVLELFRSPNYVQPLLISIVLQLSQQLSGINAVFYYSTGIFKDAGVQEPIYATIGAGVVNTIFTVVSLFLVERAGRRTLHMIGLGGMAVCSVFMTISLLLKDDYEAMSFVCIVAILIYVAFFEIGPGPIPWFIVAELFSQGPRPAAIAVAGCCNWTSNFLVGMLFPSAAAYLGAYVFIIFAAFLIFFLIFTFFKVPETKGRTFEDIARAFEGQAHSGKGPAGVELNSMQPVKETPGNA

SEQ ID NO: 23649 - protein, 493 aa, Mus musculus
MGTTKVTPSLVFAVTVATIGSFQFGYNTGVINAPETILKDFLNYTLEERLEDLPSEGLLTALWSLCVAIFSVGGMIGSFSVGLFVNRFGRRNSMLLVNLLAIIAGCLMGFAKIAESVEMLILGRLLIGIFCGLCTGFVPMYIGEVSPTALRGAFGTLNQLGIVVGILVAQIFGLDFILGSEELWPGLLGLTIIPAILQSAALPFCPESPRFLLINKKEEDQATEILQRLWGTSDVVQEIQEMKDESVRMSQEKQVTVLELFRSPNYVQPLLISIVLQLSQQLSGINAVFYYSTGIFKDAGVQEPIYATIGAGVVNTIFTVVSLFLVERAGRRTLHMIGLGGMAVCSVFMTISLLLKDDYEAMSFVCIVAILIYVAFFEIGPGPIPWFIVAELFSQGPRPAAIAVAGCCNWTSSFLVGMLFPSAAAYLGAYVFIIFAAFLIFFLIFTFFKVPETKGRTFEDIARAFEGQAHSGKGPAGVELNSMQPVKETPGNA

SEQ ID NO: 23650 - protein, 509 aa, Mus musculus
MPSGFQQIGSDDGEPPRQRVTGTLVLAVFSAVLGSLQFGYNIGVINAPQKVIEQSYNATWLGRQGPGGPDSIPQGTLTTLWALSVAIFSVGGMISSFLIGIISQWLGRKRAMLANNVLAVLGGALMGLANAAASYEILILGRFLIGAYSGLTSGLVPMYVGEIAPTHLRGALGTLNQLAIVIGILVAQVLGLESMLGTATLWPLLLALTVLPALLQLILLPFCPESPRYLYIIRNLEGPARKSLKRLTGWADVSDALAELKDEKRKLERERPMSLLQLLGSRTHRQPLIIAVVLQLSQQLSGINAVFYYSTSIFESAGVGQPAYATIGAGVVNTVFTLVSVLLVERAGRRTLHLLGLAGMCGCAILMTVALLLLERVPAMSYVSIVAIFGFVAFFEIGPGPIPWFIVAELFSQGPRPAAMAVAGFSNWTCNFIVGMGFQYVADAMGPYVFLLFAVLLLGFFIFTFLKVPETRGRTFDQISAAFRRTPSLLEQEVKPSTELEYLGPDEND

SEQ ID NO: 23651 - protein, 509 aa, Mus musculus
MPSGFQQIGSDDGEPPRQRVTGTLVLAVFSAVLGSLQFGYNIGVINAPQKVIEQSYNATWLGRQGPGGPDSIPQGTLTTLWALSVAIFSVGGMISSFLIGIISQWLGRKRAMLANNVLAVLGGALMGLANAVASYEILILGRFLIGAYSGLTSGLVPMYVGEIAPTHLRGALGTLNQLAIVIGILVAQVLGLESMLGTATLWPLLLALTVLPALLQLILLPFCPESPRYLYIIRNLEGPARKSLKRLTGWADVSDALAELKDEKRKLERERPMSLLQLLGSRTHRQPLIIAVVLQLSQQLSGINAVFYYSTSIFESAGVGQPAYATIGAGVVNTVFTLVSVLLVERAGRRTLHLLGLAGMCGCAILMTVALLLLERVPAMSYVSIVAIFGFVAFFEIGPGPIPWFIVAELFSQGPRPAAMAVAGFSNWTCNFIVGMGFQYVADAMGPYVFLLFAVLLLGFFIFTFLKVPETRGRTFDQISAAFRRTPSLLEQEVKPSTELEYLGPDEND

SEQ ID NO: 23652 - protein, 508 aa, Mus musculus
MPSGFQQIGSDDGEPPRQRVTGTLVLAVFSAVLGSLQFGYNIGVINAPQKVIEQSYNATWLGRQGPGGPDSIPQGTLTTLWALSVAIFSVGGMISSFLIGIISQWLGRKRAMLANNVLAVLGGALMGLANAVASYEILILGRFLIGAYSGLTSGLVPMYVGEIAPTHLRGALGTLNRLAIVIGILVAQVLGLESMLGTATLWPLLLALTVLPALLQLILLPFCPESPRYLYIIRNLEGPARKSLKPLTGWADVSDALAELKDEKRKLERERPMSLLQLLGSRTHRQPLIIAVVLQLSQQLSGINAVFYYSTSIFESAGVGQPAYATIGAGVVNTVFTLVSVLLVERAGRRTLHLLGLAGMCGCAILMTVALLLLERVPAMSYVSIVAIFGFVAFFEIGPGPIPWFVAELFSQGPRPAAMAVAGFSNWTCNFIVGMGFQYVADRMGPYVFLLFAVLLLGFFIFTFLKVPETRGRTFDQISAAFRRTPSLLEQEVKPSTELEYLGPDEND

SEQ ID NO: 23653 - protein, 510 aa, Mus musculus
MPSGFQQIGSDVKDGEPPRQRVTGTLVLAVFSAVLGSLQFGYNIGVINAPQKVIEQSYNATWLGRQGPGGPDSIPQGTLTTLWALSVAIFSVGGMISSFLIGIISQWLGRKRAMLANNVLAVLGGALMGLANAVASYEILILGRFLIGAYSGLTSGLVPMYVGEIAPTHLRGALGTLNRLAIVIGILVAQVLGLESMLGTATLWPLLLALTVLPALLQLILLPFCPESPRYLYIIRNLEGPARKSLKPLTGWADVSDALAELKDEKRKLERERPMSLLQLLGSRTHRQPLIIAVVLQLSQQLSGINAVFYYSTSIFESAGVGQPAYATIGAGVVNTVFTLVSVLLVERAGRRTLHLLGLAGMCGCAILMTVALLLLERVPAMSYVSIVAIFGFVAFFEIGPGPIPWFVAELFSQGPRPAAMAVAGFSNWTCNFIVGMGFQYVADRMGPYVFLLFAVLLLGFFIFTFLKVPETRGRTFDQISAAFRRTPSLLEQEVKPSTELEYLGPDEND

SEQ ID NO: 23654 - protein, 501 aa, Mus musculus
MEEKHQEETGELTLVLALATLIAAFGSSFQYGYNVAAVNSPSEFMQQFYNDTYYDRNEENIESFTLTLLWSLTVSMFPFGGFIGSLMVGTLVNKLGRKGALLFNNIFSILPAILMGCSQIAQSFELIIISRLLVGICAGISSNVVPMYLGELAPKNLRGALGVVPQLFITVGILVAQLFGLRSLLANEDGWPVLLGLTGVPAGLQLLLLPFFPESPRYLLIQKKDEAAAERALQTLRGWKDVHLEMEEIRKEDEAEKAAGFISVWKLFTMQSLRWQLISMIVLMAGQQLSGVNAIYYYADQIYLSAGVKSDDVQYVTAGTGAVNVFMTILTIFVVELWGRRFLLLVGFSTCLIACLVLTAALALQNTISWMPYISIVCVIVYVIGHALGPSPIPALLITEIFLQSSRPAAYMIGGSVHWLSNFTVGLIFPFIQMGLGPYSFIIFATICFLTTIYIFMVVPETKGRTFIEINQIFTMKNKVSDVYPKKEEELGALPHAILEQ

SEQ ID NO: 23655 - protein, 478 aa, Rattus norvegicus
MSPEDPQETQPLLRSPGARAPGGRRVFLATFAAALGPLSFGFALGYSSPAIPSLRRTAPPALRLGDTAASWFGAVVTLGAAAGGVLGGWLLDRAGRKLSLLLCTVPFVTGFAVITAARDVWMLLGGRLLTGLACGVASLVAPVYISEIAYPAVRGLLGSCVQLMVVTGILLAYVAGWVLEWRWLAVLGCVPPTLMLLLMCYMPETPRFLLTQHQYQEAMAALRFLWGSEEGWEEPPVGAEHQGFQLAMLRRPGVHKPLIIGICLMVFQQLSGVNAIMFYANTIFEEAKFKDSSLASVTVGIIQVLFTAVAALIMDRAGRKLLLALSGVIMVFSMSAFGTYFKLTQSGPSNSSHVGLLVPISAEPADVHLGLAWLAVGSMCLFIAGFAVGWGPIPWLLMSEIFPLHIKGVATGVCVLTNWFMAFLVTKEFNSIMEILRPYGAFWLTAAFCILSVLFTLTFVPETKGRTLEQITAHFEGR

SEQ ID NO: 23656 - protein, 479 aa, Rattus norvegicus
MSPEDPQETQPLLRSPGARAPGGRRVFLATFAAALGPLSFGFALGYSSPAIPSLRRTAPPALRLGDTAASWFGAVVTLGAAAQGAVLGGWLLDRAGRKLSLLLCTVPFVTGFAVITAARDVWMLLGGRLLTGLACGVASLVAPVYISEIAYPAVRGLLGSCVQLMVVTGILLAYVAGWVLEWRWLAVLGCVPPTLMLLLMCYMPETPRFLLTQHQYQEAMAALRFLWGSEEGWEEPPVGAEHQGFQLAMLRRPGVHKPLIIGICLMVFQQLSGVNAIMFYANTIFEEAKFKDSSLASVTVGIIQVLFTAVAALIMDRAGRKLLLALSGVIMVFSMSAFGTYFKLTQSGPSNSSHVGLLVPISAEPADVHLGLAWLAVGSMCLFIAGFAVGWGPIPWLLMSEIFPLHIKGVATGVCVLTNWFMAFLVTKEFNSIMEILRPYGAFWLTAAFCILSVLFTLTFVPETKGRTLEQITAHFEGR

SEQ ID NO: 23657 - protein, 618 aa, Rattus norvegicus
MGERRRRQPEPGAPGGERSLLAAESAASLQGAELERAARRQFQRDETPAFVYAAAAFSALGGFLFGYDTGVVSGAMLLLRRQMRLGAMWQELLVSGAVGAAAVAALAGGALNGALGRRSAILLASALCTVGSAVLAAAANKETLLAGRLVVGLGIGIASMTVPVYIAEVSPPNLRGRLVTINTLFITGGQFFASVVDGAFSYLQKDGWRYMLGLAAIPAVIQFLGFLFLPESPRWLIQKGQTQKARRILSQMRGNQTIDEEYDSIRNSIEEEEKEASAAGPIICRMLSYPPTRRALAVGCGLQMFQQLSGINTIMYYSATILQMSGVEDDRLAIWLASITAFTNFIFTLVGVWLVEKVGRRKLTFGSLAGTTVALTILALGFLLSAQVSPRVTFRPTAPSGQNATCTEYSYCNECMLDPDCGFCYKINSSAVIDSSCVPVNKASTNEAAWGRCENETKFKAEDVHWAYSFCPTPYSWTALVGLVLYLVFFAPGMGPMPWTVNSEIYPLWARSTGNACSAGINWIFNVLVSLTFLHTAEYLTYYGAFFLYAGFAAVGLLFVYGCLPETKGKKLEEIESLFDHRLCTCGTADSDEGRYIEYIRVKGSNYHLSDNDASDVE

SEQ ID NO: 23658 - protein, 509 aa, Rattus norvegicus
MPSGFQQIGSEDGEPPQQRVTGTLVLAVFSAVLGSLQFGYNIGVINAPQKVIEQSYNATWLGRQGPGGPDSIPQGTLTTLWALSVAIFSVGGMISSFLIGIISQWLGRKRAMLANNVLAVLGGALMGLANAAASYEILILGRFLIGAYSGLTSGLVPMYVGEIAPTHLRGALGTLNQLAIVIGILVAQVLGLESMLGTATLWPLLLAITVLPALLQLLLLPFCPESPRYLYIIRNLEGPARKSLKRLTGWADVSDALAELKDEKRKLERERPLSLLQLLGSRTHRQPLIIAVVLQLSQQLSGINAVFYYSTSIFELAGVEQPAYATIGAGVVNTVFTLVSVLLVERAGRRTLHLLGLAGMCGCAILMTVALLLLERVPSMSYVSIVAIFGFVAFFEIGPGPIPWFIVAELFSQGPRPAAMAVAGFSNWTCNFIVGMGFQYVADAMGPYVFLLFAVLLLGFFIFTFLRVPETRGRTFDQISATFRRTPSLLEQEVKPSTELEYLGPDEND

SEQ ID NO: 23659 - protein, 493 aa, Rattus norvegicus
MGTAKVTPSLVFAVTVATIGSFQFGYNTGVINAPETIIKDFLNYTLEERLEDLPREGLLTTLWSLCVAIFSVGGMIGSFSVGLFVNRFGRRNSMLLVNLIAILGGCLMGFAKIAESVEMLILGRLIIGIFCGLCTGFVPMYIGEVSPTALRGAFGTLNQLGIVVGILVAQVFGLDFILGSEELWPGLLGLTIIPAILQSAALPFCPESPRFLLINRKEEDQATEILQRLWGTPDVIQEIQEMKDESIRMSQEKQVTVLELFKSPSYFQPLLISVVLQLSQQFSGINAVFYYSTGIFQDAGVQEPIYATIGAGVVNTIFTVVSLFLVERAGRRTLHMIGLGGMAVCSVFMTISLLLKDEYEAMSFVCIVAILVYVAFFEIGPGPIPWFIVAELFSQGPRPAAMAVAGCSNWTSNFLVGMFFPSAAAYLGAYVFIIFAAFLVFFLIFTSFKVPETKGRTFEDITRAFEGQAHSGKGSAGVELNSMQPVKETPGNA

SEQ ID NO: 23660 - protein, 509 aa, Rattus norvegicus
MPSGFQQIGSEDGEPPQQRVTGTLVLAVFSAVLGSLQFGYNIGVINAPQKVIEQSYNATWLGRQGPGGPDSIPQGTLTTLWALSVAIFSVGGMISSFLIGIISQWLGRKRAMLANNVLAVLGGALMGLANAAASYEILILGRFLIGAYSGLTSGLVPMYVGEIAPTHLRGALGTLNQLAIVIGILVAQVLGLESMLGTATLWPLLLAITVLPALLQLLLLPFCPESPRYLYIIRNLEGPARKSLKRLTGWADVSDALAELKDEKRKLERERPLSLLQLLGSRTHRQPLIIAVVLQLSQQLSGINAVFYYSTSIFELAGVEQPAYATIGAGVVNTVFTLVSVLLVERAGQRTLHLLGLAGMCGCAILMTVALLLLERVPSMSYVSIVAIFGFVAFFEIGPGPIPWFIVAELFSQGPRPAAMAVAGFSNWTCNFIVGMGFQYVADAMGPYVFLLFAVLLLGFFIFTFLRVPETRGRTFDQISATFRRTPSLLEQEVKPSTELEYLGPDEND

SEQ ID NO: 23661 - protein, 493 aa, Rattus norvegicus
MGTAKVTPSLVFAVTVATIGSFQFGYNTGVINAPETIIKDFLNYTLEERLEDLPSEGLLTTLWSLCVAIFSVGGMIGSFSVGLFVNRFGRRNSMLLVNLIAILGGCLMGFAKIAESVEMLILGRLIIGIFCGLCTGFVPMYIGEVSPTALRGAFGTLNQLGIVVGILVAQVFGLDFILGSEELWPGLLGLTIIPAILQSAALPFCPESPRFLLINRKEEDQATEILQRLWGTPDVIQEIQEMKDESIRMSQEKQVTVLELFKSPSYFQPLLISVVLQLSQQFSGINAVFYYSTGIFQDAGVQEPIYATIGAGVVNTIFTVVSLFLVERAGRRTLHMIGLGGMAVCSVFMTISLLLKDEYEAMSFVCIVAILVYVAFFEIGPGPIPWFIVAELFSQGPRPAAMAVAGCSNWTSNFLVGMFFPSAAAYLGAYVFIIFAAFLVFFLIFTFFKVPETKGRTFEDITRAFEGQAQSGKGSAGVELNSMQPVKETPGNA

SEQ ID NO: 23662 - protein, 502 aa, Rattus norvegicus
MEKEDQEKTGKLTLVLALATFLAAFGSSFQYGYNVAAVNSPSEFMQQFYNDTYYDRNKENIESFTLTLLWSLTVSMFPFGGFIGSLMVGFLVNNLGRKGALLFNNIFSILPAILMGCSKIAKSFEIIIASRLLVGICAGISSNVVPMYLGELAPKNLRGALGVAPQLFITVGILVAQLFGLRSVLASEEGWPILLGLTGVPAGLQLLLLPFFPESPRYLLIQKKNESAAEKALQTLRGWKDVDMEMEEIRKEDEAEKAAGFISVWKLFRMQSLRWQLISTIVLMAGQQLSGVNAIYYYADQIYLSAGVKSNDVQYVTAGTGAVNVFMTMVTVFVVELWGRRNLLLIGFSTCLTACIVLTVALALQNTISWMPYVSIVCVIVYVIGHAVGPSPIPALFITEIFLQSSRPSAYMIGGSVHWLSNFIVGLIFPFIQVGLGPYSFIIFAIICLLTTIYIFMVVPETKGRTFVEINQIFAKKNNVSDVYPEKEEKELNDLPPATREQ

SEQ ID NO: 23663 - protein, 502 aa, Rattus norvegicus
MEKEDQEKTGKLTLVLALATFLAAFGSSFQYGYNVAAVNSPSEFMQQFYNDTYYDRNKENIESFTLTLLWSLTVSMFPFGGFIGSLMVGFLVNNLGRKGALLFNNIFSILPAILMGCSKIAKSFEIIIASRLLVGICAGISSNVVPMYLGELAPKNLRGALGVVPQLFITVGILVAQLFGLRSVLASEEGWPILLGLTGVPAGLQLLLLPFFPESPRYLLIQKKNESAAEKALQTLRGWKDVDMEMEEIRKEDEAEKAAGFISVWKLFRMQSLRWQLISTIVLMAGQQLSGVNAIYYYADQIYLSAGVKSNDVQYVTAGTGAVNVFMTMVTVFVVELWGRRNLLLIGFSTCLTACIVLTVALALQNTISWMPYVSIVCVIVYVIGHAVGPSPIPALFITEIFLQSSRPSAYMIGGSVHWLSNFIVGLIFPFIQVGLGPYSFIIFAIICLLTTIYIFMVVPETKGRTFVEINQIFAKKNKVSDVYPEKEEKELNDLPPATREQ

SEQ ID NO: 23664 - protein, 502 aa, Rattus norvegicus
MEKEDQEKTGKLTLVLALATFLAAFGSSFQYGYNVAAVNSPSEFMQQFYNDTYYDRNKENIESFTLTLLWSLTVSMFPFGGFIGSLMVGFLVNNLGRKGALLFNNIFSILPAILMGCSKIAKSFEIIIASRLLVGICAGISSNVVPMYLGELAPKNLRGALGVVPQLFITVGILVAQLFGLRSVLASEEGWPILLGLTGVPAGLQLLLLPFFPESPRYLLIQKKNESAAEKALQTLRGWKDVDMEMEEIRKEDEAEKAAGFISVWKLFRMQSLRWQLISTIVLMTGQQLSGVNAIYYYADQIYLSAGVKSNDVQYVTAGTGAVNVFMTMVTVFVVELWGRRNLLLIGFSTCLTACIVLTVALALQNTISWMPYVSIVCVIVYVIGHAVGPSPIPALFITEIFLQSSRPSAYMIGGSVHWLSNFIVGLIFPFIQVGLGPYSFIIFAIICLLTSIYIFMVVPETKGRTFVEINQIFAKKNKVSDVYPEKEEKELNDLPPATREQ

SEQ ID NO: 23665 - protein, 464 aa, Escherichia coli O157:H7 EDL933
MPDAKKQGQSNKAMTFFVCFLAALAGLLFGLDIGVIAGALPFIADEFQITSHTQEWVVSSMMFGAAVGAVGSGWLSFKLGRKKSLMIGAILFVAGSLFSAAAPNVEVLILSRVLLGLAVGVASYTAPLYLSEIAPEKIRGSMISMYQLMITIGILGAYLSDTAFSYTGAWRWMLGVIIIPAILLLIGVFFLPDSPRWFAAKRRFVDAERVLLRLRDTSAEAKRELDEIRESLQVKQSGWALFKENSNFRRAVFLGVLLQVMQQFTGMNVIMYYAPKIFELAGYTNTTEQMWGTVIVGLTNVLATFIAIGLVDRWGRKPTLTLGFLVMAAGMGVLGTMMHIGIHSPSAQYFAIAMLLMFIVGFAMSAGPLIWVLCSEIQPLKGRDFGITCSTATNWIANMIVGATFLTMLNTLGNANTFWVYAGLNVLFILLTLWLVPETKHVSLEHIERNLMKGRKLREIGAHD

SEQ ID NO: 23666 - protein, 472 aa, Escherichia coli O157:H7 EDL933
MVTINTESALTPRSLRDTRRMNMFVSVAAAVAGLLFGLDIGVIAGALPFITDHFVLTSRLQEWVVSSMMLGAAIGALFNGWLSFRLGRKYSLMAGAILFVLGSIGSAFATSVEMLIAARVVLGIAVGIASYTAPLYLSEMASENVRGKMISMYQLMVTLGIVLAFLSDTAFSYSGNWRAMLGVLALPAVLLIILVVFLPNSPRWLAEKGRHIEAEEVLRMLRDTSEKAREELNEIRESLKLKQGGWALFKINRNVRRAVFLGMLLQAMQQFTGMNIIMYYAPRIFKMAGFTTTEQQMIATLVVGLTFMFATFIAVFTVDKAGRKPALKIGFSVMALGTLVLGYCLMQFDNGTASSGLSWLSVGMTMMCIAGYAMSAAPVVWILCSEIQPLKCRDFGITCSTTTNWVSNMIIGATFLTLLDSIGAAGTFWLYTALNIAFVGITFWLIPETKNVTLEHIERKLMAGEKLRNIGV

SEQ ID NO: 23667 - protein, 491 aa, Escherichia coli O157:H7 EDL933
MNTQYNSSYIFSITLVATLGGLLFGYDTAVISGTVESLNTVFVAPQNLSESAANSLLGFCVASALIGCIIGGALGGYCSNRFGRRDSLKIAAVLFFISGVGSAWPELGFTSINPDNTVPVYLAGYVPEFVIYRIIGGIGVGLASMLSPMYIAELAPAHIRGKLVSFNQFAIIFGQLLVYCVNYFIARSGDASWLNTDGWRYMFASECIPALLFLMLLYTVPESPRWLMSRGKQEQAEGILRKIMGNTLATQAVQEIKHSLDHGRKTGGRLLMFGVGVIVIGVMLSIFQQFVGINVVLYYAPEVFKTLGASTDIALLQTIIVGVINLTFTVLAIMTVDKFGRKPLQIIGALGMAIGMFSLGTAFYTQAPGIVALLSMLFYVAAFAMSWGPVCWVLLSEIFPNAIRGKALAIAVAAQWLANYFVSWTFPMMDKNSWLVAHFHNGFSYWIYGCMGVLAALFMWKFVPETKGKTLEELEALWEPETKKTQQTATL

SEQ ID NO: 23668 - protein, 443 aa, Escherichia coli O157:H7 EDL933
MQPSRNFDDLKFSSIHRRILLWGSGGPFLDGYILVMIGVALEQLTPALKLDADWIGLLGAGTLAGLFVGTSLFGYISDKVGRRKMFLIDIIAIGVISVATMFVSSPVELLVMRVLIGIVIGADYPIATSMITEFSSTRQRAFSISFIAAMWYVGATCADLVGYWLYDVEGGWRWMLGSAAIPCLLILIGRFELPESPRWLLRKGRVKECEEMMIKLFGEPVAFDEEQPQQTRFRDLFNRRHFPFVLFVAAIWTCQVIPMFAIYTFGPQIVGLLGLGVGKNAALGNVVISLFFMLGCIPPMLWLNTAGRRPLLIGSFAMMTLALAVLGLIPDMGIWLVVMAFAVYAFFSGGPGNLQWLYPNELFPTDIRASAVGVIMSLSRIGTIVSTWALPIFINNYGISNTMLMGAGISLFGLLISVAFAPETRGMSLAQTSNMTIRGQRMG

SEQ ID NO: 23669 - protein, 469 aa, Escherichia coli O157:H7 EDL933
MMGRCLFGFSGEKPFLLPDNEGVKMNTSPVRMDDLPLNRFHCRIAALTFGAHLTDGYVLGVIGYAIIQLTPAMQLTPFMAGMIGGSAHLGLFLGSLVLGWISDHIGRQKIFTFSFLLITLASFLQFFATTPEHLIGLRILIGIGLGGDYSVGHTLLAEFSPRRHRGVLLGAFSVVWTVGYVLASIAGHHFISENPEAWRWLLASAALPALLITLLRWGTPESPRWLLRQGRFAEAHAIVHRYFGPHVLLGDEVATATHKHIKTLFSSRYWRRTAFNSVFFVCLVIPWFVIYTWLPTIAQTIGLEDALTASLMLNALLIVGALLGLVLTHLLAHRKFLLGSFLLLAATLVVMACLPSGSSLTLLLFVLFSTTISAVSNLVGILPAESFPTDIRSLGVGFATAMSRLGAAVSTGLLPWVLAQWGMQVTLLLLAAVLLAGFVVTWLWAPETKALPLVAAGNVGGANEHSVSV

SEQ ID NO: 23670 - protein, 531 aa, Emericella nidulans
MAFKKSYNVYFLCGFMTLGGGLFGFDISSMSGVLGTAAYNNYFQVGGGNYKQGGITCAMPFGSLVGALASSFLADKYSRVTAIQFSSTLWIIGSVFQCAANGIPLLVVGRVIAGLCVGIASAMVPVYIAEVSPKHIRGRMISLQQWAITWGILIQYFIQYGASNVDGGPDNETQSTAAFRIPWGIQIVPGVIYFVGLFLYPKSPRWLASKDRWDECMHVLARLHGNGDMNHPLVLAQYKEIQDALALEREQASTSYQELIKPRIAKRVFLGMSLQMWSQLSGMNVMMYYIVYIMQSTGAGSPLLTASIQYILNTALTLPAILWLDRFGRRPAILIGFTMQAIFLYIEGGLQAGYGRSTRPSDDLNAISWTVADHPGVGKAIIAMSYLFVCSFATTIGPTSWTYPAEIYPAKVRAKAVSLATASNWTWNCLLALFVPPLLWNINWKMYMIFAAFNTVAALHMFLTAPETKGYTLEEMDEVFESGIAPWKKRKISSRLEQIEREIAEGNLKVTDRTGPVDPVQENVGEPEKAV

SEQ ID NO: 23671 - protein, 495 aa, Anopheles gambiae str. PEST
IVHQVKMAEEKTTPMAALKQTLLSLSVSLSYYCIGLVRGYSAPAVPSMHATVPDLLPSKSIASWVSSIPPFGAFFGSLVAFPLMHRIGRKYTVLIASPLWVISWILIATANDWRVLFVARMLSGFGAGLSLPAAQVYVSECSDPKIRGVIGSLPALSMSVGILVMYIMGKFFHWRLLAWICCGMACCLFLAVACFPQSPVWLKTRKQYEKAHYSAKWLHLQGFSIDPKATSAVVERKEKQHSSPAEPTPKPFSKEALLRREILIPLGIGLVLLSIQQLSGIDAVVFFTVEIFHAAGSSMDGHLATIIVGTVQVLSNGAALFVVDRAGRKPLLIMSGLIMCLAMASMGAAFHLNSIGNTCFGYLPVVSLIVFMVGFSIGFGSIPFLLMGELFPTAQRSLLSSLAGSFNLAMMFTVIKTYHPLEDLITTSGTFLMYSVLCALGVVFVITCVPETKGRELESIQKLFERRPQPCSQLELGGEKASHDNPSFSAADEAV

SEQ ID NO: 23672 - protein, 468 aa, Shigella flexneri 2a str. 301
MEGIMPDAKKQGRSNKAMTFFVCFLAALAGLLFGLDIGVIAGALPFIADEFQITSHTQEWVVSSMMFGAAVGAVGIGWLSFKLGRKKSLMIGAILFVAGSLFSAAAPNVEVLILSRVLLGLAVGVASYTAPLYLSEIAPEKIRGSMISMYQLMITIGILGAYLSDTAFSYTGAWRWMLGVIIIPAILLLIGVFFLPDSPRWFAAKRRFVDAERVLLRLRDTSAEAKRELDEIRESLQVKQSGWALFKENSNFRRAVFLGVLLQVMQQFTGMNVIMYYAPKIFELAGYTNTTEQMWGTVIVGLTNVLATFIAIGLVDRWGRKPTLTLGFLVMAAGMGVLGTMMHIGIHSPSAQYFAIAMLLMFIVGFAMSAGPLIWVLCSEIQPLKGRDFGITCSTATNWIANMIVGATFLTMLNTLGNANTFWVYAALNVLFILLTLWLVPETKHVSLEHIERNLMKGRKLREIGAHD

SEQ ID NO: 23673 - protein, 507 aa, Shigella flexneri 2a str. 301
MSQQFNPYLCCFRPDTCVNCSRIFSQCLTLCWQEKMVTINTESALTPRSLRDTRRMNMFVSVAAAVAGLLFGLDIGVIAGALPFITDHFVLTSRLQEWVVSSMMLGAAIGALFNGWLSFRLGRKYSLMAGAILFVLGSIGSAFATSVEMLIAARVVLGIAVGIASYTAPLYLSEMASENVRGKMISMYQLMVTLGIVLAFLSDTAFSYSGNWRAMLGVLALPAVLLIILVVFLPNSPRWLAEKGRHIEAEEVLRMLRDTSEKAREELNEIRESLKLKQGGWALFKINRNVRRAVFLGMLLQAMQQFTGMNIIMYYAPRIFKMAGFTTTEQQMIATLVVGLTFMFATFIAVFTVDKAGRKPALKIGFSVMALGTLVLGYCLMQFDNGTASSGLSWLSVGMTMMCIAGYAMSAAPVVWILCSEIQPLKCRDFGITCSTTTNWVSNMIIGAAFLTLLDSIGAAGTFWLYTALNIAFVGITFWLIPETKNVTLEHIERKLMAGEKLRNIGV

SEQ ID NO: 23674 - protein, 491 aa, Shigella flexneri 2a str. 301
MNTQYNSSYIFSITLVATLGGLLFGYDTAVISGTVESLNTVFVAPQNLSESAANSLLGFCVASALIGCIIGGALGGYCSNRFGRRDSLKISAVLFFISGVGSAWPELGFTSINPDNTVPIYLAGYVPEFVIYRIIGGIGVGLASMLSPMYIAELAPAHIRGKLVSFNQFAIIFGQLLVYCVNYFIARSGDASWLNTDGRRYMFASECIPALLFLMLLYTVPESPRWLMSRGKQEQTESILRKIMGNTLATQAVQEIKHSLDHGRKTGGRLLMFGVGVIVIGVMLSIFQQFVGINVVLYYAPEVFKTLGASTDIALLQTIIVGVINLTFTVLAIMTVDKFGRKPLQIIGALGMAIGMFSLGTAFYTQASGIVALLSMLFYVAAFAMSWGPVCWVLLSEIFPNAIRGKALAIAVAAQWLANYFVSWTFPMMDKNSWLVAHFHNGFSYWIYGCMGVLAALFMWKFVPETKGKTLEELEALWEPETKKTQQTATL

SEQ ID NO: 23675 - protein, 469 aa, Shigella flexneri 2a str. 301
MTGRCLFGFSGEKPFLLPDNEGVKMNTSPVRMDDLPLNRFHCRIATLTFGAHLTDGYVLGVIGYAIIQLTPAMQLTPFMAGMIGGSALLGLFLGSLVLGWISDHIGRQKIFTFSFLLITLASFLQFFATTPEHLIGLRILIGIGLGGDYSVGHTLLAEFSPRRHRGILLGAFSVVWTVGYVLASIAGHHFISENPEAWRWLLASAALPALLITLLRWGTPESPRWLLCQGRFAEAHAIVHRYFGPHVLLGDEVVTATHKHIKTLFSSRYWRRTAFNSVFFVCLVIPWFVIYTWLPTIAQTIGLEDALTASLMLNALLIVGALLGLVLTHLLAHRKFLLGSFLLLAATLVVMACLPSGSSLTLLLFVLFSTTISAVSNLVGILPAESFPTDIRSLGVGFATAMSRLGAAVSTGLLPWVLAQWGMQVTLLLLATVLLVGFVVTWLWAPETKALPLVAAGNVGGANEHSVSV

SEQ ID NO: 23676 - protein, 451 aa, Shigella flexneri 2a str. 2457T
MTFFVCFLAALAGLLFGLDIGVIAGALPFIADEFQITSHTQEWVVSSMMFGAAVGAVGIGWLSFKLGRKKSLMIGAILFVAGSLFSAAAPNVEVLILSRVLLGLAVGVASYTAPLYLSEIAPEKIRGSMISMYQLMITIGILGAYLSDTAFSYTGAWRWMLGVIIIPAILLLIGVFFLPDSPRWFAAKRRFVDAERVLLRLRDTSAEAKRELDEIRESLQVKQSGWALFKENSNFRRAVFLGVLLQVMQQFTGMNVIMYYAPKIFELAGYTNTTEQMWGTVIVGLTNVLATFIAIGLVDRWGRKPTLTLGFLVMAAGMGVLGTMMHIGIHSPSAQYFAIAMLLMFIVGFAMSAGPLIWVLCSEIQPLKGRDFGITCSTATNWIANMIVGATFLTMLNTLGNANTFWVYAALNVLFILLTLWLVPETKHVSLEHIERNLMKGRKLREIGAHD

SEQ ID NO: 23677 - protein, 472 aa, Shigella flexneri 2a str. 2457T
MVTINTESALTPRSLRDTRRMNMFVSVAAAVAGLLFGLDIGVIAGALPFITDHFVLTSRLQEWVVSSMMLGAAIGALFNGWLSFRLGRKYSLMAGAILFVLGSIGSAFATSVEMLIAARVVLGIAVGIASYTAPLYLSEMASENVRGKMISMYQLMVTLGIVLAFLSDTAFSYSGNWRAMLGVLALPAVLLIILVVFLPNSPRWLAEKGRHIEAEEVLRMLRDTSEKAREELNEIRESLKLKQGGWALFKINRNVRRAVFLGMLLQAMQQFTGMNIIMYYAPRIFKMAGFTTTEQQMIATLVVGLTFMFATFIAVFTVDKAGRKPALKIGFSVMALGTLVLGYCLMQFDNGTASSGLSWLSVGMTMMCIAGYAMSAAPVVWILCSEIQPLKCRDFGITCSTTTNWVSNMIIGAAFLTLLDSIGAAGTFWLYTALNIAFVGITFWLIPETKNVTLEHIERKLMAGEKLRNIGV

SEQ ID NO: 23678 - protein, 468 aa, Escherichia coli CFT073
MEGIMPDAKKQGRSNKAMTFFVCFLAALAGLLFGLDIGVIAGALPFIADEFQITSHTQEWVVSSMMFGAAVGAVGSGWLSFKLGRKKSLMIGAILFVAGSLFSAAAPNVEVLILSRVLLGLAVGVASYTAPLYLSEIAPEKIRGSMISMYQLMITIGILGAYLSDTAFSYTGAWRWMLGVIIIPAILLLIGVFFLPDSPRWFAAKRRFVDAERVLLRLRDTSAEAKRELDEIRESLQVKQSGWALFKENSNFRRAVFLGVLLQVMQQFTGMNVIMYYAPKIFELAGYTNTTEQMWGTVIVGLTNVLATFIAIGLVDRWGRKPTLTLGFLVMAAGMGVLGTMMHIGIHSPSAQYFAIAMLLMFIVGFAMSAGPLIWVLCSEIQPLKGRDFGITCSTATNWIANMIVGATFLTMLNTLGNANTFWVYAALNVLFILLTLWLVPETKHVSLEHIERNLMKGRKLREIGAHD

SEQ ID NO: 23679 - protein, 515 aa, Escherichia coli CFT073
MEYPSHNDMSQQFNPYLCYFRPDTCVSCSRIFSLCLTLCWQEKMVTINTESALTPRPLRDTRRMNMFVSVAAAVAGLLFGLDIGVIAGALPFITDHFVLTSRLQEWVVSSMMLGAAIGALFNGWLSFRLGRKYSLMAGAILFVLGSIGSAFATSVEMLIAARVVLGIAVGIASYTAPLYLSEMASENVRGKMISMYQLMVTLGIVLAFLSDTAFSYSGNWRAMLGVLALPAVLLIILVVFLPNSPRWLAEKGRHIEAEEVLRMLRDTSEKAREELNEIRESLKLKQGGWALFKINRNVRRAVFLGMLLQAMQQFTGMNIIMYYAPRIFKMAGFTTTEQQMIATLVVGLTFMFATFIAVFTVDKAGRKPALKIGFSVMALGTLVLGYCLMQFDNGTASSGLSWLSVGMTMMCIAGYAMSAAPVVWILCSEIQPLKCRDFGITCSTTTNWVSNMIIGATFLTLLDSIGAAGTFWLYTALNIAFVGITFWLIPETKNVTLEHIERKLMAGEKLRNIGV

SEQ ID NO: 23680 - protein, 469 aa, Escherichia coli CFT073
MTGRCLFGFSGEKPFLLPDNEGVKMNTSPVRMDDLPLNRFHCRIAALTFGAHLTDGYVLGVIGYAIIQLTPAMQLTPFMAGMIGGSALLGLFLGSLVLGWISDHIGRQKIFTFSFMLITLASFLQFFATTPEHLIGLRILIGIGLGGDYSVGHTLLAEFSPRRHRGILLGAFSVVWTVGYVLASIAGHHFISESPEAWRWLLASAALPALLITLLRWGTPESPRWLLRQGRFAEAHAIVHRYFGPHVLLGDEVATATHKHIKTLFSSRYWRRTAFNSVFFVCLVIPWFVIYTWLPTIAQTIGLEDALTASLMLNALLIVGALLGLVLTHLLAHRRFLLGSFLLLTATLVVMACLPSGSSLTLLLFVLFSTTISAVSNLVGILPAESFPTDIRSLGVGFATAMSRLGAAVSTGLLPWVLAQWGMQATLLLLAAVLLVGFVVTWLWAPETKALPLVAAGNVGGANEHSVSV

SEQ ID NO: 23681 - protein, 443 aa, Escherichia coli CFT073
MQPSRNFDDLKFSSIHRRILLWGSGGPFLDGYVLVMIGVALEQLTPALKLDADWIGLLGAGTLAGLFVGTSLFGYISDKVGRRKMFLIDIIAIGVISVATMFVSSPVELLVMRVLIGIVIGADYPIATSMITEFSSTRQRAFSISFIAAMWYVGATCADLVGYWLYDVEGGWRWMLGSAAIPCLLILIGRFELPESPRWLLRKGRVKECEEMMIKLFGEPVAFEEEQPQQTRFRDLFNRRHFPFVLFVAAIWTCQVIPMFAIYTFGPQIVGLLGLGVGKNAALGNVVISLFFMLGCIPPMLWLNTAGRRPLLIGSFAMMTLALAVLGLIPDMGIWLVVMAFAVYAFFSGGPGNLQWLYPNELFPTDIRASAVGVIMSLSRIGTIVSTWALPIFINNYGISNTMLMGAGISLFGLLISVAFAPETRGMSLAQTSNMTIRGQRMG

SEQ ID NO: 23682 - protein, 457 aa, Bacillus subtilis subsp. subtilis str. 168
MKKQSNIWLYFFGALGGALYGYDTGVISGAILFMKKELGLNAFTEGLVVSSLLVGAILGSGAAGKLTDRFGRKKAIMAAALLFCIGGLGVALAPNTGVMVLFRIILGLAVGTSTTIVPLYLSELAPKHKRGALSSLNQLMITVGILLSYIVNYIFADAEAWRWMLGLAAVPSLLLLIGILFMPESPRWLFTNGEESKAKKILEKLRGTKDIDQEIHDIKEAEKQDEGGLKELFDPWVRPALIAGLGLAFLQQFIGTNTIIYYAPKTFTNVGFGNSASILGTVGIGTVNVLMTLVAIKIIDKIGRKPLLLFGNAGMVISLIVLALVNLFFNNTPAASWTTVICLGVFIVVFAVSWGPVVWVMLPELFPLHVRGIGTGVSTLMLHVGTLIVSLTYPILMEAIGISYLFLIYAAIGIMAFLFVRFKVTETKGRSLEEIEQDLRDKNGQGGAAGKQQTVGT

SEQ ID NO: 23683 - protein, 464 aa, Bacillus subtilis subsp. subtilis str. 168
MKNTPTQLEPNVPVTRSHSMGFVILISCAAGLGGLLYGYDTAVISGAIGFLKDLYSLSPFMEGLVISSIMIGGVVGVGISGFLSDRFGRRKILMTAALLFAISAIVSALSQDVSTLIIARIIGGLGIGMGSSLSVTYITEAAPPAIRGSLSSLYQLFTILGISATYFINLAVQRSGTYEWGVHTGWRWMLAYGMVPSVIFFLVLLVVPESPRWLAKAGKTNEALKILTRINGETVAKEELKNIENSLKIEQMGSLSQLFKPGLRKALVIGILLALFNQVIGMNAITYYGPEIFKMMGFGQNAGFVTTCIVGVVEVIFTVIAVLLIDKVGRKKLMSIGSAFMAIFMILIGTSFYFELTSGIMMIVLILGFVAAFCVSVGPITWIMISEIFPNHLRARAAGIATIFLWGANWAIGQFVPMMIDSFGLAYTFWIFAVINILCFLFVVTICPETKNKSLEEIEKLWIK

SEQ ID NO: 23684 - protein, 513 aa, Glycine max
  unsure (1)..(513): unsure at all Xaa locations
MAGGSFTTGTVSKERAEQYKGRVTAYVIISCIVAATGGALFGYDIGISGGVTSMDDFLIEFFPSVYRQKKHAHENNYCKYDNQGLAAFTSSLYIAGLVASLMASPVTRKYGRRVSIIGGGISFLIGSALNASAVNLIMLILGRVMLGVGIGFGNQAIPLGSSEMAPTHLRGGLNMMFQVATTFGIFTANMINFGTQKIKPWGWRLSLGLAAVPALLMTVGGIFLPDTPNSLIERGLAEKGRKLLEKIRGTKEVDAEFQDMVDASELAKSIKHPFRNILERRYRPELVMAIFMPTFQILTGINSILFYAPVLFQSMGFGGDASLISSALTGGVLASSTFISIATVDRLGRRVLLVSGGLQMITCQIIVAIILGVKFGADQELSKGFSILVVVVICLFVVAFGWSWGPLGWTVPSEIFPLEIRSAGQGITVAVNLLFTFIIAQAFLALLCSFKFGIFLFFAGWITIMTIFVYLFLPETKGIPIEEMSFMWRRHWFWKRICPDGSIXITHANDVMK

SEQ ID NO: 23685 - protein, 235 aa, Lycopersicon esculentum
KRRNRPQLIMAIMMPTFQILTGINIILFYAPVLFQSMGFKRAASLYSSALTGAVLASSTLLSMATVDRWGRRVLLITGGIQMIICQVIVAIILGLKFGSDKELSRGYSIIVVVFICLFVAAFGYSWGPLGWTVPSEIFPLETRSAGQSITVTVNLFFTFAIAQSFLSLLCAMRFGIFLFFSCWIAVMTIFIYLFLPETKGVPIEEMMRLWEKHWFWKKIVSEDQQVKNTNGLNHA

SEQ ID NO: 23686 - protein, 525 aa, Oryza sativa
  unsure (1)..(525): unsure at all Xaa locations
MPGGSLLNSGGNGGGGGSGGGLTFPVVVTCLMAASGGLIFGYDIGISGGVSEMESFLEKFFPGLLKGTAHAXXKDVYCIYNSQALTAFTSSLYAFGMVGTLVASRVTRRTGRQAVMLIGGSMFLVGALVNAAAVNIAMLIIGRMLLGLGLGFSGQATPVYLAEMSPPRWRGGFISGFPLFISVGYLIANLINYGTSRIPVWGWRLSLGLAAFPAAVMVAGAAFIPDTPSSLVLRGKHDLARAALQXGARQGRRRRRRXFNDILAAVEHDRRNDEGAFRRXXLRREYRPYLVMAIAFPVFLNLTGVAVTAFFSPILFRTVGFESDAALMGAVILGLMNIFGIVGSGFAMDRYGRRLLFMIGGALMFTCQVAMASIVGSQLGHGSKMAKGYAVTVLVMTCAFSASFSWSWGALYWAIPGEIYPVEVRSAGQGVAVALNLGLNFVQAQCFLAMLCCFKYGTFLFYASWLVVMTAFAVAFVPETKGVPLESMGHVFARHWYWGRFVKEQVRRRVDLKFAPHMPMRNVWL

SEQ ID NO: 23687 - protein, 262 aa, Triticum aestivum
  unsure (1)..(262): unsure at all Xaa locations
XAMLIVGRMMLGLGLGFSGQATPVYLAEMSPPRWRGGFISAFPLFISVGYLVANLINYGTSRIPEWGWRLSLGLAAVPAAVMVLGAVLITDTPSSLVLRGMHDHARAALQRVRGKGVDVDAEFSDILAAVEHDRRNQEGAFRRILRREYRPYLVMAVAFPVFLNLTGVTVSAFFSPILFRTIGFGSDAALMGAIILGLMNIGGIIASGVAMDRYGRKLLFAIGGALMFTCQVAMASIAGTHLGHGSKMPKGYAVAVLVLTCV

SEQ ID NO: 23688 - protein, 648 aa, Gibberella fujikuroi
  unsure (1)..(648): unsure at all Xaa locations
MTERELHADVRRFYQHTSQTLTGLRTLSHRARSPRCSRGVAAKGQHRECHREAVRKGSPDSGGTTDTVIPLSAAEKRALINEIDHSFSENGMWMVIFTVSLSAFLQGFVQSSQNGANLFADQWLKSQKHTVNSQFAYANAAVYFSAAVIRMSTGCTDEFTVWSPWCHYCRLISHLCGIRWLGFITLNDNAWLSLRSIRLIGGVGMGLKATSTPILAAETAVGSWRGSSVLLWQLWVSFGIMMSFIVNICLNQIDDKNLKLRLILASPAVFALMLMYTVAKCPESFRYYLMPGSRKYSPEKHMPRCYDCATPRLQAVRDLYLTYKGIDTEFENERYDSIKAAPKPRALVVGAVSHYVRQYWKILKVHRFGMQLLQQGLWLCRSNFLEFNLMAFYGGTTLVGISPGNQPTEDQISKAMLYNLIFGLSNFLFCLPAIHSIDVLGRRRVLLFTIQPSGSTVCYKRLVPVRVSLTLKTVHTVFYSPGMGPVPFVLASESFPLAFRDTGASLAISINLLFAGLLAWLQPLLVTGIRFGGTLGVFAGLNVVAFALIFLLMEETSGVPLESLGSVFDQSKKDLIHFQLFKFLPWFGRFILGRSSLAERPERTVDLSPXSVTAASVTDDDDEERIWNSDTVSSGVRLADMLGGNGRG

SEQ ID NO: 23689 - protein, 594 aa, Neurospora crassa
MAIFAMGWQKPDNVAGSSAPAIMVGLFVATGGLLLGYDTGTINGILAMKSFKDHFSTGYIDGNGQPGIYPKESALIVAMLSAGTAIGALLAAPLGDHYGRRRSLIGAIGIFVIGAILQVCAYNIDLLVAGRTVAGVGIGIVSVLVPLYQSEMAPKWIRGTLVCTYQLSITMGLLAAAVVNILTYKLKTAAAYRVPIGLQLTWACVLALGLTVLPETPRYLIKRGDKNAAALSLSRLRRLDITHPALVEELAEIEANHQYEMALGPDSYKDILFGEPHLGRRTFTGCCLQMLQQLTGVNFIMYYGTTFFNNAGVGNPFKISLIMQVINTASTIPGLFVVESWGRRRLLMVGAIGMAICQLLIAAFATASGSNNLSAQNKVLITFVAIYIFFFAASWGPVVWVVTSEIYPLKVRAKSMSITTASNWFLNFGIAYGTPYMQTNSAASDESSIDLGSKVFFVWGAFCIVAVGFVWCMVYETSKISLEQIDEMYERVDHAWHSRRFEPSWSFQEMRDLGFSDGGIPPTQQLQQQPQQPQQQQQQHHQQQQHQLQVDLQQSQSRTSNSSTSQTDTGGSNNTGASQDDKLVASLGNIDLSY

SEQ ID NO: 23690 - protein, 594 aa, Neurospora crassa
MAIFAMGWQKPDNVAGSSAPAIMVGLFVATGGLLLGYDTGTINGILAMKSFKDHFSTGYIDGNGQPGIYPKESALIVAMLSAGTAIGALLAAPLGDHYGRRRSLIGAIGIFVIGAILQVCAYNIDLLVAGRTVAGVGIGIVSVLVPLYQSEMAPKWIRGTLVCTYQLSITMGLLAAAVVNILTYKLKTAAAYRVPIGLQLTWACVLALGLTVLPETPRYLIKRGDKNAAALSLSRLRRLDITHPALVEELAEIEANHQYEMALGPDSYKDILFGEPHLGRRTFTGCCLQMLQQLTGVNFIMYYGTTFFNNAGVGNPLKISLIMQVINTASTIPGLFVVESWGRRRLLMVGAIGMAICQLLIAAFATASGSNNLSAHNKVLITFVAIYIFFFAASWGPVVWVVTSEIYPLKVRAKSMSITTASNWFLNFGIAYGTPYMQTNSAASDESSIDLGSKVFFVWGAFCIVAVGFVWCMVYETSKISLEQIDEMYERVDHAWHSRRFEPSWSFQEMRDLGFSDGGIPPTQQLQQQPQQPQQQQQQHHQQQQHQLQVDLQQSQSRTSNSSTSQTDTGGSNNTGASQDDKLVASLGNIDLSY

SEQ ID NO: 23691 - protein, 537 aa, Neurospora crassa
MYKIGNIYFIAAVAVIGGALFGFDISSMSAIISTQPYLCQFNQLGHNEKGLCLGPTNDVQGGITAAMPGGSWLGALCSGFVSDTFGRKRSIQIGSVIWIIGSVIVCASVNIPMLVVGRIINGFSVGICSAQVPVYISEIALPSKRGRLVGFQQWAITWGILIMFFICYGCSFMKGTAAFRVPWGLQAIPAALLFLGLVFLPESPRWLCKKDRWDEAKDVLTLVHGKGNPNSPWVHREMQEIREMVEFERANADVSYFELFKPNMINRTSIGVFTQIWSQLTGMNVMMYYITYVFTMAGLADGSENAVLLPSGIQFVINVVMTIPALLWMDRWGRRPTLLVGAFFMCLWLCVNAGLFAVYSRPARPGEFTSPAESMAITGAPAKAVIASTYLFVASFAPTWGPVSWTYPPELYPLRLRGKAVALCTSANWAFNFALAYFVPPAFANITWKTYVIFATFCAAMFIHVFFMFPETANKPLEEVEEIFDDTKPGAIKYIGTPAWKTRNTRNLTLKQEHNDTLSSEEKIGLEEHAHKETTGR

SEQ ID NO: 23692 - protein, 606 aa, Caenorhabditis elegans
MVAVAAFSSSGQDKPAHTPKLGLFVYILAAASVIGGFLFGYDTSVVSAAMLYMPDAPGLKPMDTVWQEVLVSISPGMAAVGSLMSGTSSDYIGRRKVILGASAIFTIGALVCAASVNKIMLLVGRVLLGIAIGFASMIVPVYLGETAPTHVRGMLVAAFALMISFGQVVANITGGAFSYIDPYNVGWRLMFAFAAVPSIIQFVCFMFLPETPRWLYENGFETETREVLEKVYNGDKEWVEYEMAEIIAFNEDQAKENEKAHASGPVIWRILKTPHVLKACFIGSMLQAFQQLAGINTILYYTADIIRSSGISNNHTTIWISVLLSLCNFIGPFVPMSLIEKVGRRIIFLFSCGLVVLSLVFIGVAFLLVNHDSAATLPANQYGSNFNSSYPDAKGCMAYSNCDYCVTTDACGFCHDANTKQGYCLPAGFDNPEVYSSTGSCTNSNGSIANNFKWEKYYCDTKYTLLPIIACGVYLLTFSSGFTSLPWVLNSEFYPMWARSTCVAISTTSNWVFNLIIALTYLSLTQVIGKYGAFWLYAGLTVIAFIFILFLVPETKGYSIEEVEMLFMNKKQRREAESRRRETVTEVRSRMNSTVSFGQHNEVHKY

SEQ ID NO: 23693 - protein, 613 aa, Caenorhabditis elegans
MVAVEFKVSESGRPRPEKNPKLGFFVYLLGSAAIIGGFLFGYDTSVVSAAMLYVPEAPGLKPMGTVWKEVIVSITPGMAAVGAWFSGAGSDRYGRKPIIIGSTLIFVCGAVICAVAWTKIVMLIGRIFLGVGIGFASMVVPVYLGEASPTHVRGTLVSAFAMMISFGQVVANIMGGVFSYWEPYTIGWRLMFAFAGIPALIQFVCFIFLPETPRWLYENGHTEQAEQVLEKIYGGNTEWIEYELAEIKTYAEERQKQMEEEKKSGPVIWRILKTPHVLKACFIGSMLQAFQQLAGINTILYYTADIIRSAGIENYHTIIWISVILSICNLIGPFAPMFFIEKLGRRKLFLFSCAGVVVSLVLIGVSFLLVGNDSAPNFDRSAYLLAGNYQSNGEAESCLMLSNCDSCVTSEHCGFCEDSETRTGFCLPVDHNDVTLYSSTGLCTNGLDKSNSSFPNATSYVWQKHHCTTSYTILPIVMMGVYLLTFSCGFTSLPWVLNSEFYPMWARSTCVSISTLSNWVFNLIIALTYLSLTHAITKYGAFWLYAIFTIIAFIFIYFLVPETTGYSIDEVEMLFMNKRQRNIAMQARQAKLDAASDKDKNSSTSLSTETITM

SEQ ID NO: 23694 - protein, 604 aa, Caenorhabditis elegans
MVQVAPVAAGAGSGQTRPSSDPKTGWFVYMLAFSAVIGGFLFGYDTGIVSAAMLYVPNASGIKPLDSVWQEIIVSITPGVAAIGSLCSGPGSDFLGRKKIIIGASVTFTIGAIICAAAWTKIILLIGRILLGLAIGFASMIVPIYVSEASPSHIRGKLVTGFQLMITVGLVIANIIGGAFSYVDPDQVGWRLMFAFAAVPAIIQFVCFLFLPESPRWLYEHGRTVEAREVLTRIYNGHTEWVDYEINEISFSYEEELRAKAEHAGNGPTIIRILKTPHVRKAMIIGSLLQMFQQLSGINTVMYYTGNIIRSAGVKDNHTTIWISVGTSAINFLGTFIPIALVERVGRRVLLLVSMIGVILFLIAMGVSFLLINNDSLRTFDQQNYTLNYNPSVKHAAKCLKYSNCDFCVTDENCGFCESKVAKKGYCLPFPSDDSSDYSATGICEFSNLTNNGTDFEWEDTYCHTKFTVLPIIIMVFYLLSFSAGYAPLPWVLNAEFYPLWARSTAVSVSTACNWIFNLIVSLTFLSLSQAATKYGTFFIYCGCTMVALVFVFFFVPETKGYSIDEVEMLFMTKEERRKAQKVLDESKEGKHRNSVAMSFDTKF

SEQ ID NO: 23695 - protein, 639 aa, Caenorhabditis elegans
MVQVAPVAAGAGSGQTRPSSDPKTGWFVYMLAFSAVIGGFLFGYDTGIVSAAMLYVPNASGIKPLDSVWQEIIVSITPGVAAIGSLCSGPGSDFLGRKKIIIGASVTFTIGAIICAAAWTKIILLIGRILLGLAIGFASMIVPIYVSEASPSHIRGKLVTGFQLMITVGLVIANIIGGAFSYVDPDQVGWRQKSDFFLEFLLPNSQLISIFSKFHFQSFPNPPFSRLMFAFAAVPAIIQFVCFLFLPESPRWLYEHGRTVEAREVLTRIYNGHTEWVDYEINEISFSYEEELRAKAEHAGNGPTIIRILKTPHVRKAMIIGSLLQMFQQLSGINTVMYYTGNIIRSAGVKDNHTTIWISVGTSAINFLGTFIPIALVERVGRRVLLLVSMIGVILFLIAMGVSFLLINNDSLRTFDQQNYTLNYNPSVKHAAKCLKYSNCDFCVTDENCGFCESKVAKKGYCLPFPSDDSSDYSATGICEFSNLTNNGTDFEWEDTYCHTKFTVLPIIIMVFYLLSFSAGYAPLPWVLNAEFYPLWARSTAVSVSTACNWIFNLIVSLTFLSLSQAATKYGTFFIYCGCTMVALVFVFFFVPETKGYSIDEVEMLFMTKEERRKAQKVLDESKEGKHRNSVAMSFDTKF

SEQ ID NO: 23696 - protein, 433 aa, Drosophila melanogaster
MTDRTITSFEVTKDAGSWVGGIMPLAALAGGITGGPLIEYLGRRSTILATAVPFIVSSLLIACAVNVIMILCGRFLTGFCVGIASLSLPVYLGETLQPEVRGTLGLLPTALGNIGILVCYVAGSFMNWSMLAFLGAALPVPFLILMIIIPETPRWFVNRGQEERARKALKWLRGKEADVEPELKELMQSQADADRQATQNTCLELFKRNNLKPLSISLGLMFFQQFSGINAVIFYTVQIFKDAGSTIDSNLSTIIVGVVNFFATFMGIILIDRLGRKILLYVSDIAMIVTLSILGGFFYCKAHGPDVSHLGWLPLTCFVIYILGFSLGFGPIPWLMMGEILPAKIRGPAASVVTAFNWFCTFVVTKTFQDLTVAMGAHGAFWLFGAICIVGLFFVIIFVPETRGKSLEEIERKMMGRVPMSSVVNIKPFPFNM

SEQ ID NO: 23697 - protein, 488 aa, Drosophila melanogaster
MKILMRADTHVSFSVPADGLKANFTFSQVLAALSVSLCSLVVGFVSAYTSPALVSMTDRTITSFEVTKDAGSWVGGIMPLAALAGGITGGPLIEYLGRRSTILATAVPFIVSSLLIACAVNVIMILCGRFLTGFCVGIASLSLPVYLGETLQPEVRGTLGLLPTALGNIGILVCYVAGSFMNWSMLAFLGAALPVPFLILMIIIPETPRWFVNRGQEERARKALKWLRGKEADVEPELKELMQSQADADRQATQNTCLELFKRNNLKPLSISLGLMFFQQFSGINAVIFYTVQIFKDAGSTIDSNLSTIIVGVVNFFATFMGIILIDRLGRKILLYVSDIAMIVTLSILGGFFYCKAHGPDVSHLGWLPLTCFVIYILGFSLGFGPIPWLMMGEILPAKIRGPAASVVTAFNWFCTFVVTKTFQDLTVAMGAHGAFWLFGAICIVGLFFVIIFVPETRGKSLEEIERKMMGRVPMSSVVNIKPFPFNM

SEQ ID NO: 23698 - protein, 498 aa, Danio rerio
MNEYEENRPLLVNDERTEEDRSEQDAYLDKVKNGKLFIATFAAVLGPLSFGFVLGYSSPAIPELRRIQDLRLQLSVEEASWFGSVVTIGAALGGLLGGWIVERIGRKLSLMFCAIPFIFGFTTIIAAQNHWMFYVGRVLTGLASGVTSLVVPLYISEMAHERVRGTLGSCVQLMVVIGIMGAYVTGLFLDWRWLAVASSIPPTLMLLSMCFMPETPRFLLCQGKRREAEDALRFLRGPDAPAEWECARIEDAYKNEEQSFSLGDLKDPGVYKPLGIGVMMMLLQQFTGINAIMFYAETIFEQAHFKSSDVATVIVAATQVVFTAIAALIMDKAGRKVLLILSGVVMCVSEAVFGVYFKLTVMKPNNSSMTSVLTDTHGLLEDQPSADLAWLAVGSMGFFIAGFAIGWGPTPWLVMSEIFPTRVRGLGSALCVLTNWTCAFIVTKTFQNLMDALSSAGTFWMFSALCASNVVFTAFFVPETKGKTLEEIQAGFKGTRMR

SEQ ID NO: 23699 - protein, 464 aa, Escherichia coli K12
MPDAKKQGRSNKAMTFFVCFLAALAGLLFGLDIGVIAGALPFIADEFQITSHTQEWVVSSMMFGAAVGAVGSGWLSFKLGRKKSLMIGAILFVAGSLFSAAAPNVEVLILSRVLLGLAVGVASYTAPLYLSEIAPEKIRGSMISMYQLMITIGILGAYLSDTAFSYTGAWRWMLGVIIIPAILLLIGVFFLPDSPRWFAAKRRFVDAERVLLRLRDTSAEAKRELDEIRESLQVKQSGWALFKENSNFRRAVFLGVLLQVMQQFTGMNVIMYYAPKIFELAGYTNTTEQMWGTVIVGLTNVLATFIAIGLVDRWGRKPTLTLGFLVMAAGMGVLGTMMHIGIHSPSAQYFAIAMLLMFIVGFAMSAGPLIWVLCSEIQPLKGRDFGITCSTATNWIANMIVGATFLTMLNTLGNANTFWVYAALNVLFILLTLWLVPETKHVSLEHIERNLMKGRKLREIGAHD

SEQ ID NO: 23700 - protein, 443 aa, Escherichia coli K12
MQPSRNFDDLKFSSIHRRILLWGSGGPFLDGYVLVMIGVALEQLTPALKLDADWIGLLGAGTLAGLFVGTSLFGYISDKVGRRKMFLIDIIAIGVISVATMFVSSPVELLVMRVLIGIVIGADYPIATSMITEFSSTRQRAFSISFIAAMWYVGATCADLVGYWLYDVEGGWRWMLGSAAIPCLLILIGRFELPESPRWLLRKGRVKECEEMMIKLFGEPVAFDEEQPQQTRFRDLFNRRHFPFVLFVAAIWTCQVIPMFAIYTFGPQIVGLLGLGVGKNAALGNVVISLFFMLGCIPPMLWLNTAGRRPLLIGSFAMMTLALAVLGLIPDMGIWLVVMAFAVYAFFSGGPGNLQWLYPNELFPTDIRASAVGVIMSLSRIGTIVSTWALPIFINNYGISNTMLMGAGISLFGLLISVAFAPETRGMSLAQTSNMTIRGQRMG

SEQ ID NO: 23701 - protein, 401 aa, Escherichia coli O157:H7
MMGRCLFGFSGEKPFLLPDNEGVKMNTSPVRMDDLPLNRFHCRIAALTFGAHLTDGYVLGVIGYAIIQLTPAMQLTPFMAGMIGGSAHLGLFLGSLVLGWISDHIGRQKIFTFSFLLITLASFLQFFATTPEHLIGLRILIGIGLGGDYSVGHTLLAEFSPRRHRGVLLGAFSVVWTVGYVLASIAGHHFISENPEAWRWLLASAALPALLITLLRWGTPESPRWLLRQGRFAEAHAIVHRYFGPHVLLGDEVATATHKHIKTLFSSRYWRRTAFNSVFFVCLVIPWFVIYTWLPTIAQTIGLEDALTASLMLNALLIVGALLGLVLTHLLAHRKFLLGSFLLLAATLVVMACLPSGSSLTLLLLFSSAPPFRQSVIWWAFCLRKVFLLTFARWASVLPPP

SEQ ID NO: 23702 - protein, 496 aa, Gallus gallus
MADKKKITASLIYAVSVAAIGSLQFGYNTGVINAPEKIIQAFYNRTLSQRSGETISPELLTSLWSLSVAIFSVGGMIGSFSVSLFVNRFGRRNSMLLVNVLAFAGGALMALSKIAKAVEMLIIGRFIIGLFCGLCTGFVPMYISEVSPTSLRGAFGTLNQLGIVVGILVAQIFGLEGIMGTEALWPLLLGFTIVPAVLQCVALLFCPESPRFLLINKMEEEKAQTVLQKLRGTQDVSQDISEMKEESAKMSQEKKATVLELFRSPNYRQPIIISITLQLSQQLSGINAVFYYSTGIFERAGITQPVYATIGAGVVNTVFTVVSLFLVERAGRRTLHLVGLGGMAVCAAVMTIALALKEKWIRYISIVATFGFVALFEIGPGPIPWFIVAELFSQGPRPAAMAVAGCSNWTSNFLVGMLFPYAEKLCGPYVFLIFLVFLLIFFIFTYFKVPETKGRTFEDISRGFEEQVETSSPSSPPIEKNPMVEMNSIEPDKEVA

SEQ ID NO: 23703 - protein, 496 aa, Gallus gallus
MADKKKITASLIYAVSVAAIGSLQFGYNTGVINAPEKIIQAFYNRTLSQRSGETISPELLTSLWSLSVAIFSVGGMIGSFSVSLFFNRFGRRNSMLLVNVLAFAGGALMALSKIAKAVEMLIIGRFIIGLFCGLCTGFVPMYISEVSPTSLRGAFGTLNQLGIVVGILVAQIFGLEGIMGTEALWPLLLGFTIVPAVLQCVALLFCPESPRFLLINKMEEEKAQTVLQKLRGTQDVSQDISEMKEESAKMSQEKKATVLELFRSPNYRQPIIISITLQLSQQLSGINAVFYYSTGIFERAGITQPVYATIGAGVVNTVFTVVSLFLVERAGRRTLHLVGLGGMAVCAAVMTIALALKEKWIRYISIVATFGFVALFEIGPGPIPWFIVAELFSQGPRPAAMAVAGCSNWTSNFLVGMLFPYAEKLCGPYVFLIFLVFLLIFFIFTYFKVPETKGRTFEDISRGFEEQVETSSPSSPPIEKNPMVEMNSIEPDKEVA

SEQ ID NO: 23704 - protein, 482 aa, Gallus gallus
MAAEESQYLLAHRTSDAYLRVQNKKLYLATFAAVLGPLSFGFVLGYSSPAIPELRKIDNPKLRLDSNQASWFGSIVTLGAAAGGILGGYLVDKIGRKLSLMLCSIPFVSGYIVIISAQNVWMLYFGRILTGLASGITSLVVPVYISEISHTDVRGMLGSFVQLMVVTGILGAYIAGLTLKWHWLAVLCSFPPCVMLLFMLFMPETPRFLLDQKKRAEAIAALQFLRGPYVDHEWECRQIEANVEEEGLSLFEFKNPSIYRPLLIGVILMFLQQVTGINAVMSYAETIFEDANFQDSRMASVVVGFIQVCFTAVAALIIDKTGRKVLLYVSGMIMALSTALFGFYFKMVLPNGNNSSNTDLWFTLNSVTPGTDTRLSWLAVVSLGLFVAGFALGWGPVPWLVMSEIFPLKARGVSSSACVLTNWVMAFLVTKEFHDFIGFLTSYGTFWLFSAFCCLSVTFAAFYVPETKGRTLEQIEAYFRKS

SEQ ID NO: 23705 - protein, 490 aa, Gallus gallus
MESGSKMTARLMLAVGGAVLGSLQFGYNTGVINRPQKVIEDFYNHTWLYRYEEPISPATLTTLWSLSVAIFSVGGMIGSFSVGLFVNRFGRRNSMLMSNILAFLAAVLMGFSKMALSFEMLILGRFIIGLYSGLTTGFVPMYVGEVSPTALRGALGTFHQLGIVLGILIAQVFGLDLIMGNDSLWPLLLGFIFVPALLQCIILPFAPESPRFLLINRNEENKAKSVLKKLRGTTDVSSDLQEMKEESRQMMREKKVTIMELFRSPMYRQPILIAIVLQLSQQLSGINAVFYYSTSIFEKSGVEQPVYATIGSGVVNTAFTVVSLFVVERAGRRTLHLIGLAGMAGCAILMTIALTLLDQMPWMSYLSIVAIFGFVAFFEIGPGPIPWFIVAELFSQGPRPAAFAVAGLSNWTSNFIVGMGFQYIAQLCGSYVFIIFTVLLVLFFIFTYFKVPETKGRTFDEIAYRFRQGGASQSDKTPDEFHSLGADSQV

SEQ ID NO: 23706 - protein, 533 aa, Gallus gallus
MDGKSKMQAEKHLTGTLVLSVFTAVLGFFQYGYSLGVINAPQKVIEAHYGRMLGAIPMVRHATNTSRDNATITVTIPGTEAWGSSEGTLAPSAGFEDPTVSPHILTMYWSLSVSMFAVGGMVSSFTVGWIGDRLGRVKAMLVVNVLSIAGNLLMGLAKMGPSHILIIAGRAITGLYCGLSSGLVPMYVSEVSPTALRGALGTLHQLAIVTGILISQVLGLDFLLGNDELWPLLLGLSGVAALLQFFLLLLCPESPRYLYIKLGKVEEAKKSLKRLRGNCDPMKEIAEMEKEKQEAASEKRVSIGQLFSSSKYRQAVIVALMVQISQQFSGINAIFYYSTNIFQRAGVGQPVYATIGVGVVNTVFTVISVFLVEKAGRRSLFLAGLMGMLISAVAMTVGLVLLSQFAWMSYVSMVAIFLFVIFFEVGPGPIPWFIVAELFSQGPRPAAIAVAGFCNWACNFIVGMCFQYIADLCGPYVFVVFAVLLLVFFLFAYLKVPETKGKSFEEIAAAFRRKKLPAKSMTELEDLRGGEEA

SEQ ID NO: 23707 - protein, 464 aa, Salmonella enterica subsp. enterica serovar Typhi
MPDNKKQGRSNKAMTFFVCFLAALAGLLFGLDIGVIAGALPFITDEFQITAHTQEWVVSSMMFGAAVGAVGSGWLSFKLGRKKSLMIGAILFVAGSLFSAAAPNVEVLIISRVLLGLAVGVASYTAPLYLSEIAPEKIRGSMISMYQLMITIGILGAYLSDTAFSYSGAWRWMLGVIIIPAILLLIGVFFLPDSPRWFAAKRRFHDAERVLLRLRDTSAEAKRELDEIRESLQVKQSGWALFKENSNFRRAVFLGILLQVMQQFTGMNVIMYYAPKIFELAGYTNTTEQMWGTVIVGLTNVLATFIAIGLVDRWGRKPTLTLGFLVMAIGMGILGTMMHIGIHSPSAQYFAIAMLLMFIIGFAMSAGPLIWVLCSEIQPLKGRDFGITCSTATNWIANMIVGATFLTMLNNLGNANTFWVYAGLNVLFILLTLWLVPETKHVSLEHIERNLMKGRKLREIGAHD

SEQ ID NO: 23708 - protein, 471 aa, Salmonella enterica subsp. enterica serovar Typhi
MVSINDSALTPRSLRDTRRMNMFVSVSAAVAGLLFGLDIGVIAGALPFITDHFVLTSRLQEWVVSSMMLGAAIGALFNGWLSFRLGRKYSLMAGAILFVLGSLGSAFASSVEVLIGARVILGVAVGIASYTAPLYLSEMASENVRGKMISMYQLMVTLGIVLAFLSDTAFSYSGNWRAMLGVLALPAVLLIILVVFLPNSPRWLAQKGRHIEAEEVLRMLRDTSEKARDELNEIRESLKLKQGGWALFKANRNVRRAVFLGMLLQAMQQFTGMNIIMYYAPRIFKMAGFTTTEQQMIATLVVGLTFMFATFIAVFTVDKAGRKPALKIGFSVMALGTLVLGYCLMQFDNGTASSGLSWLSVGMTMMCIAGYAMSAAPVVWILCSEIQPLKCRDFGITCSTTTNWVSNMIIGATFLTLLDSIGAAGTFWLYTALNIAFIGITFWLIPETKNVTLEHIERKLMAGEKLRNIGV

SEQ ID NO: 23709 - protein, 477 aa, Homo sapiens [sequence omitted]

SEQ ID NO: 23710 - protein, 477 aa, Homo sapiens
MTPEDPEETQPLLGPPGGSAPRGRRVFLAAFAAALGPLSFGFALGYSSPAIPSLQRAAPPAPRLDDAAASWFGAVVTLGAAAGGVLGGWLVDRAGRKLSLLLCSVPFVAGFAVITAAQDVWMLLGGRLLTGLACGVASLVAPVYISEIAYPAVRGLLGSCVQLMVVVGILLAYLAGWVLEWRWLAVLGCVPPSLMLLLMCFMPETPRFLLTQHRRQEAMAALRFLWGSEQGWEDPPIGAEQSFHLALLRQPGIYKPFIIGVSLMAFQQLSGVNAVMFYAETIFEEAKFKDSSLASVVVGVIQVLFTAVAALIMDRAGRRLLLVLSGVVMVFSTSAFGAYFKLTQGGPGNSSHVAISAPVSAQPVDASVGLAWLAVGSMCLFIAGFAVGWGPIPWLLMSEIFPLHVKGVATGICVLTNWLMAFLVTKEFSSLMEVLRPYGAFWLASAFCIFSVLFTLFCVPETKGKTLEQITAHFEGR

SEQ ID NO: 23711 - protein, 477 aa, Homo sapiens
MTPEDPEETQPLLGPPGGSAPRGRRVFLAAFAAALGPLSFGFALGYSSPAIPSLQRAAPPAPRLDDAAASWFGAVVTLGAAAGGVLGGWLVDRAGRKLSLLLCSVPFVAGFAVITAAQDVWMLLGGRLLTGLACGVASLVAPVYISEIAYPAVRGLLGSCVQLMVVVGILLAYLAGWVLEWRWLAVLGCVPPSLMLLLMCFMPETPRFLLTQHRRQEAMAALRFLWGSEQGWEDPPIGAEQSFHLALLRQPGIYKPFIIGVSLMAFQQLSGVNAVMFYAETIFEEAKFKDSSLASVVVGVIQVLFTAVAALIMDRAGRRLLLVLSGVVMVFSTSAFGAYFKLTQGGPGNSSHVAISAPVSAQPVDASVGLAWLAVGNMCLFIAGFAVGWGPIPWLLMSEIFPLHVKGVATGICVLTNWLMAFLVTKEFSSLMEVLRPYGAFWLASAFCIFSVLFTLFCVPEIKGKTLEQITAHFEGR

SEQ ID NO: 23712 - protein, 629 aa, Homo sapiens
  unsure (1)..(629): unsure at all Xaa locations
MGERRRKQPEPDAASAAGECSLLAAAESSTSLQSAGAGGGGVGDLERAARRQFQQDETPAFVYVVAVFSALGGFLFGYDTGVVSGAMLLLKRQLSLDALWQELLVSSTVGAAAVSALAGGALNGVFGRRAAILLASALFTAGSAVLAAANNKETLLAGRLVVGLGIGIASMTVPVYIAEVSPPNLRGRLVTINTLFITGGQFFASVVDGAFSYLQKDGWRYMLGLAXVPAVIQFFGFLFLPESPRWLIQKGQTQKARRILSQMRGNQTIDEEYDSIKNNIEEEEKEVGSAGPVICRMLSYPPTRRALIVGCGLQMFQQLSGINTIMYYSATILQMSGVEDDRLAIWLASVTAFTNFIFTLVGVWLVEKVGRRKLTFGSLAGTTVALIILALGFVLSAQVSPRITFKPIAPSGQNATCTRYSYCNECMLDPDCGFCXKMNKSTVIDSSCVPVNKASTNEAAWGRCENETKFKTEDIFWAYNFCPTPYSWTALLGLILYLVFFAPGMGPMPWTVNSEIYPLWARSTGNACSSGINWIFNVLVSLTFLHTAEYLTYYGAFFLYAGFAAVGLLFIYGCLPETKGKKLEEIESLFDNRLCTCGTSDSDEGRYIEYIRVKGSNYHLSDNDASDVE

SEQ ID NO: 23713 - protein, 520 aa, Homo sapiens
MEFHNGGHVSGIGGFLVSLTSRMKPHTLAVTPALIFAITVATIGSFQFGYNTGVINAPETIIKEFINKTLTDKANAPPSEVLLTNLWSLSVAIFSVGGMIGSFSVGLFVNRFGRRNSMLIVNLLAATGGCLMGLCKIAESVEMLILGRLVIGLFCGLCTGFVPMYIGEISPTALRGAFGTLNQLGIVIGILVAQIFGLELILGSEELWPVLLGFTILPAILQSAALPCCPESPRFLLINRKKEENATRILQRLWGTQDVSQDIQEMKDESARMSQEKQVTVLELFRVSSYRQPIIISIVLQLSQQLSGINAVFYYSTGIFKDAGVQQPIYATISAGVVNTIFTLLSLFLVERAGRRTLHMIGLGGMAFCSTLMTVSLLLKNHYNGMSFVCIGAILVFVACFEIGPGPIPWFIVAELFSQGPRPAAMAVAGCSNWTSNFLVGLLFPSAAYYLGAYVFIIFTGFLITFLAFTFFKVPETRGRTFEDITRAFEGQAHGADRSGKDGVMGMNSIEPAKETTTNV

SEQ ID NO: 23714 - protein, 497 aa, Homo sapiens
MDNRQNVTPALIFAITVATIGSFQFGYNTGVINAPETIIKEFINKTLTDKANAPPSEVLLTNLWSLSVAIFSVGGMIGSFSVGLFVNRFGRRNSMLIVNLLAATGGCLMGLCKIAESVEMLILGRLVIGLFCGLCTGFVPMYIGEISPTALRGAFGTLNQLGIVIGILVAQIFGLELILGSEELWPVLLGFTILPAILQSAALPCCPESPRFLLINRKKEENATRILQRLWGTQDVSQDIQEMKDESARMSQEKQVTVLELFRVSSYRQPIIISIVLQLSQQLSGINAVFYYSTGIFKDAGVQQPIYATISAGVVNTIFTLLSLFLVERAGRRTLHMIGLGGMAFCSTLMTVSLLLKNHYNGMSFVCIGAILVFVACFEIGPGPIPWFIVAELFSQGPRPAAMAVAGCSNWTSNFLVGLLFPSAAYYLGAYVFIIFTGFLITFLAFTFFKVPETRGRTFEDITRAFEGQAHGADRSGKDGVMGMNSIEPAKETTTNV

SEQ ID NO: 23715 - protein, 357 aa, Ovis aries
QVIITHYRHVLGVSLDDGIAINNYALNSTKELPTSPGGPTPVSWAEEEAMTSASLITMFWSLSVSSFAVGGMIASFFGGLLGDKLGRIKALLVANILSLVGALLMGFSKLGPSHILIISGRGISGLYCGLISGLVPMYIGEIAPTTLRGAIGALHQLAVVTGILISQIVGLDFILGNHELWHILLGLSAVPAILQCLLLFFCPESPRYLYIKLDEEAKAKKSLKRLRGSDDVTKDITEMRKEREEASNEKKVSIIQLFTNASYRQPILVALMLHAAQQFSGINGIFYYSTSIFQTAGISQPVYATIGVGAVNTVFTAVSVFLVEKAGRRSLFLIGMSGMFVCAIFMSVGLVLLNKLP

SEQ ID NO: 23716 - protein, 622 aa, Mus musculus
MVPVENTEGPNLLNQKGREAETEGSCGASGGGHPACAGGPSMFTFLTSVTAAISGLLVGYELGLISGALLQIRTLLALTCHEQEMVVSSLLIGAFLASLTGGVLIDRYGRRLAIILSSCLLGLGSLVLIMSLSYTLLIMGRVAIGVSISLSSIATCVYIAEIAPQHRRGLLVSLNELMIVTGILFAYISNYAFANISNGWKYMFGLVIPLGVLQAIAMYFLPPSPRFLVMKGQEESAGKVLRKLRVISDTTEELTLIKSSLKDEYQYSFWDLFRSKDNMRTRILIGLTLVFFVQTTGQPNILFYASTVLKSVGFQSNEAASLASTGVGVVKVVSTIPATLLVDHIGSKTFLCIGSSVMSASLLTMGIVNLNINMNFTNICRSHSLLNQSLEEFVFYATGNLSISNSSLREHFKRITPYSKGSFMPMGNGMEPKGEMTFTSSLPNAGLSRTEHQGVTDTAVVPAAYKWLSLASLLVYVAAFSIGLGPMPWLVLSEIFPGGIRGRAMALTSSMNWGVNLLISLTFLTVTDLIGLSWVCFIYTIMSLASLAFVVLFIPETKGCSLEQISVELAKANYVKNNICFMSHHQEELVPTQLQKRKPQEQLPECNHLCGRGQSQRPSPDT

SEQ ID NO: 23717 - protein, 622 aa, Mus musculus
MVPVENTEGPNLLNQKGREAETEGSCGASGGGHPACAGGPSMFTFLTSVTAAISGLLVGYELGLISGALLQIRTLLALTCHEQEMVVSSLLIGAFLASLTGGVLIDRYGRRLAIILSSCLLGLGSLVLIMSLSYTLLIMGRVAIGVSISLSSIATCVYIAEIAPQHRRGLLVSLNELMIVTGILFAYISNYAFANISNGWKYMFGLVIPLGVLQAIAMYFLPPSPRFLVMKGQEESAGKVLRKLRVISDTTEELTLIKSSLKDEYQYSFWDLFRSKDNMRTRILIGLTLIFFVQTTGQPNILFYASTVLKSVGFQSNEAASLASTGVGVVKVVSTIPATLLVDHIGSKTFLCIGSSVMSASLLTMGIVNLNINMNFTNICRSHSLLNQSLEEFVFYATGNLSISNSSLREHFKRITPYSKGSFMPMGNGMEPKGEMTFTSSLPNAGLSRTEHQGVTDTAVVPAAYKWLSLASLLVYVAAFSIGLGPMPWLVLSEIFPGGIRGRAMALTSSMNWGVNLLISLTFLTVTDLIGLSWVCFIYTIMSLASLAFVVLFIPETKGCSLEQISVELAKANYVKNNICFMSHHQEELVPTQLQKRKPQEQLPECNHLCGRGQSQRPSPDT

SEQ ID NO: 23718 - protein, 535 aa, Rhodopseudomonas palustris
MRWNRSDALPLTFRKTVHRLPMDRHVRRWRRGTPQPEWECMADSVSAAITEPPQVPPAATGRVIDTDIPARLDGLLWSRFHTRVVAALGITWILDGLEVTLAGALAGALKDSPSLRFSNLDVGLANSAYLAGAVIGALGFGWLTDRIGRKKLFFITLALYLTATAATALSWSVTSYALFRLLTGAGIGGEYTAINSTIQELVPARYRGWTDLVINGSFWIGAAIGAVCAIVLLDPAVIDPDHGWRLAYLTGAVIGLVVFAMRWWIPESPRWLMIHGQPERAEAIVADIEQSARHAPDRPRVLPKIKLRMRTHTPLLEVAKTLFGTYRQRSLVGLVLMTAQAFFYNAIFFTYALILTDFFGISANHVGWYILPFAAGNFLGPLLLGRLFDTLGRRTMIGFTYGVSGLLLALSGYLFSIGALSAQSQTIAWMVIFFFASPAASAAYLTVSETFPLEVRALAIAIFYAIGTGIGGVAGPALFGALIDTGSRGSVFAGYLFGSVLMMAAAVIGWRYGIAAERRSLEHVARPLAATEDIR

SEQ ID NO: 23719 - protein, 472 aa, Burkholderia fungorum
MSTAYQPRASAAARLERLPFSGYHRTIFIIIAIAFFFDSVDLGTMTFVLGSIRTEFGLSSATAGLVASASFFGMVIGAAIAGLLADRFGRRPVFQWSMVLWGLASYLCSTAQSVEALIFYRVLLGFGMGMEFPIAQTLLSEFVPAASRGRLIALMDGFWPLGFIAAGVVSYFVLPTFGWRTEFALLAIPAVFVLIVRRMVPESPRWLEHRGRFGEADKILAEVEVKVMKAAGLSQLRPPAMLAEPPAAQGTGAFREIWSIAYRRRTIMVWTLWFFALLGFYGLTSWLGALMQQAGFAVTKSVLYTVLISLGGIPGFICAAWLVERWGRKPTCIASLAGSAVMAYVYGQTALHAQTPTLLICAGLAMQFFLFAMWAVLYTYTPELYGTGARATGSGFASAIGRVGSLIGPYVVGVVLPVFGQGGVFSLGAMCFVIAAAAVWILGIETRGLALETLVSEAVETDARGVLSPMRD

SEQ ID NO: 23720 - protein, 461 aa, Burkholderia fungorum
MSAYGANVAQRLDALETGPFHWRLLGLIGGGMFFDAFDNFLAGSVLGALVQQGLSDMHMNALFISMSFAGLTLGAWGAGVIGDRFGRRFSYQFNLLIFGLTSIAAAFAPSMTWLIVLRFIMGIGLGAEIVVGYSTLNEFMPAHARGRFASLLNLITNSSVLVSAACGFLIIPHFGWRWMFAIPGIGALVIWYLRKKMPESPRWLAAVGRHQEAREVVEKIEAQSLRRDAPLPVAPQEEEPGRLRDLFAARQLSRTLVGISVICISFTAMYAFVAWVPTFLVKQGFDITHSLLITSAMFAGGPAGSLISMAIADRIGRKWGLVIFSALGAMIGMAYPYVTHAVTIALVGFGVTTCIYVTSALGVACYVTELFPTRLRLRGVGLANAAGRAVNVGVPYVVAAMYALAGLLGVVSFIAALFALLVVILITLGVETRQRTLEEVQAQAGGDSGIDVKKPLNIGGM

SEQ ID NO: 23721 - protein, 450 aa, Burkholderia fungorum
AVIDLRIPWRLLFLIGAGLFLDAFDVYLGGVVTGALLKSGWSTLELNAWFTTLTFAGLTIGAWCAGILGDRFGRRFSYQLNLLIFGGASLAAAFAPSMTWLIALRFIMGIGMGAEIVISYGMLSEFVPPRYRGRLLAALSLFANSAVFVASLASLWIIPTFGWRYMFAITGVAATIVWVMRKKMPESPRWLVSQGRLEEAEAVLDGIETSVAKRHVLPDYLREDTVRAETVPLSVLFRTPVLWRSIVGSLIMVTIGYSVYGLINWLPSFFVQQGFNIVKSLTYSTVMSLGAPAGTVIGIFITDRMGRRPAIIGATLATAAIGLLYQHAASSAELLTAGFCLVAGIYVLVAVGQGAYVPELFATSYRLRGSGVCGTAGRAASALCQFFVLWLFTVGGVNMVVGSVVAVQLLLALAVWLLKIETSGLRLEQTVETGISTGTQERHRTVDISH

SEQ ID NO: 23722 - protein, 439 aa, Burkholderia fungorum
VSLPFFFDISDIFTFSYAAPALVKEWGLTMSSIAMLTSAGFFGMFLGATLGGMLSDKIGRKRALICYVIAYSVFSLANALAPDIPMLMITRVLTGVGISSATAVVMAYIAELFPAKTRGTWQSWAMVIALMGIPITSWVARLVVPSGPDGWRWIFVWGALGIVFLVFTKHFPESPRWLARQGRMEEADRTLSLIEAEVVRTTGPLPEAVAINRPAEVRAPWTSMFKGQYIGRTMTLWAIWIFQTLGFYGFQAWVPTLLVQHGITIVHSLTYITLINIGAVPGALIAVFLADRFERKFSIAGAAALIAVFGLLYGLSFQPVLIVSFGFLVGMLIQTFAALCYAYTPEQYPTDIRNTGAGFAYGMGRLANVGNSFIVAGIFMNFGYVWVFVYIAGAWLATAAVTLLFGARTTGRRLESINPVLAQAADNPLDAPILRPGDR

SEQ ID NO: 23723 - protein, 450 aa, Burkholderia fungorum
MSTSVNAGARLDRLPISRFHWKILFLIGAGVAIDAFDIYLGGTVMAATVKTGFATLHQGALFISLTFTGMLIGAGAAGYVGDRFGRRYSYQTNLLVFGLAAVGCWLAPNMPMLIVGRFIMGVGLGAEVVVATGTLCEFVPPAYRGRWAALMSLMIHIGVLAATGLSYLIIPRFGWRVMFLIAALGALVIWIMRKRMPESPRWLESVGREAEAQAVLERIEAEVARHHGSLPPVQLQPSVTAAADGRSSLAALFARGQLRKTLVGTVTGVTINIALYGFLSWIPTFLVKQGLEVSTSLGFATIIAFGGPLGVLAGLLFTDRVGRKKGLIGFAAVSAVLGVAYSHLQGQVLIGTVGFLVEGTIYGLATIGLYGFIPELFPTAIRLRGTGWCGVCSRGASIGMPYLTVMLFERFGVSGVTSMVAGVLLLLIVTVGLFSEETSQRSLESIALQD

SEQ ID NO: 23724 - protein, 468 aa, Burkholderia fungorum
MHAKETKVAIGIVNSGARLDRLPIASFHWKILGLISAGAFLDAFDIYLAAGALGAMVKAGFSDLKLNALFISVTFLGMLIGAGFAGYLGDRFGRRSSYQTNLLIFGIASIAACFVPNMMWLIVLRLIMGVGLGAELVVAAGTLCEFIPPASRGRWTALLALIINSGLLVSTAVGYVVIPHLGWRYMFAIAGVGAIIVWVLRHRMPESPRWLESVGRSDEAEATVSAIEHEVQRQKGSLPPVERIENLEVPKAPFSALFSHAMLGRTLVAILTAVAVNISVYGFVAWLPTFFVKEGLTIVQSLGFTTLMAFGAPGGALIGFLCADRVGRARGLVIFAIATIVVGFIYPNMHAGWAISSVGFVLVTCIYTVTTLGLFAYIPELFPTELRLRGTGTAGVCGRAASMTTPYLAVVLYNSFGVSGVLAMVSGVLALLVLGILLLRVETNQHALERISPSLDTDSDPMPATQQG

SEQ ID NO: 23725 - protein, 462 aa, Burkholderia fungorum
MQSTAYAASRLDRLPLSGFHWRLLCVIGFGLFLEFFDLYTGGAIVGVLLKQGWSTLQLNALFGTLTFAGLTVGAMMAGIIGDRYGRRLAYQINLVVFGIASFAAAVAPDMYWLSAIRFMMGLGIGAEAVISYGMLGEFVPPGFRGRMLAFLSVFGNSAVFVGSLVNLWVIPHLGWRYVFVIAGILAITLWIVRRSIPESPRWLETKGRIDEAEVVLQRIERSVARGGELPSYAHEVPAPTPQVSIGVLFTPPILVRTLVGSAILVCIGFSIYGLINWLPTFFIQQGFDIVKSLTWTTVITLGGPVGSLLGVAVSDRVGRRPAIIASCVVTAVCGLIYQQVDSAFALMGVGFLLVCSIYVLVAVGQGAYVPELFSTSYRLRGTGVCMTAGRLASAGCQFFILWLFTKGGVLMVVGSVVAAQLLLAFAVWAIRIETRGKRLEDLDSGVPGAPTTERSHSYSSGQ

SEQ ID NO: 23726 - protein, 467 aa, Burkholderia fungorum
MRTIDNTMGDRSSAGVSGPVTRGSIIARLERLPRNAMQVRARILIGLATFFDGFDVIAIAATLPILIAKWHLTPWEIGFLIGSGSVGQLIGAFVFPWYAERGGRVKAIALSSGIIGITSIACGFAPTFAAFVVLRVIQGLGLGGELPVAATYINEISRAHGRGRFVLLYEIVFPVGLLASNALGAWIVPRFGWQAMYFIGGMPLILFFVLRKLVPESPRWLAERERMADADTAVHAFERAVKGPLPPVTHSAEFEAMANRHPKRRMSDLFGPAYLKRTLAVAMLWITCGFIQYGLSTWLPTIYRTIYHAPLQLALNLAVAASVLGVVGSLTCALLVDKVGRKPIINLSFVACALSLLLAGVFHDSSVYVVATFCAFSLGFLACGFITAYVYTPELYPTSIRAMGCGVGGAWLKVAAIFAPAIVSKTMIGGNLQVAFYILAAVPFLAAVTVHFLGIETKGKVLEQLEA

SEQ ID NO: 23727 - protein, 470 aa, Burkholderia fungorum
MQNEATIGYRLDSLPLSGYHWRLLGLIAAGMYFDSFDIYIAGTVLAAMIHSGESTLKLNAMFVSVTFVGMMSGAWLSGVLGDRFGRRFCYQFNLGIYGFASIAAALAPSMYWLIFFRLVMGIGMGAEIVVGYGTLSEFIPAAWRGRFGTILNLIINTSLFLSTFLGWLIVPHYGWRWMFAIAGCGALFVWFLRKSMPESPRWLASRNRTDEADQVVSTIEKACGVDSATAIAAAAQQPRRAAPGNGRLGDLFTRRLLTRTITGITVLVALFIVNYAFVSWIPTFLVKQGHSVSNSLGLTSVMFAGGPVGSLIAFVLAERVGRKWGIVLFSLICAAFGAAYPFAQSEVMITALGFAITCCIYVLSSFSVATYVPELFPTELRLRGSGVSNTAGRAVSIAVPYVVAWAFTGFGIAGVLTLIVGTLLVQALIVGVLGTETRKRSLESIAAEVSDTTDASGQSVNARAASATEP

SEQ ID NO: 23728 - protein, 411 aa, Burkholderia fungorum
  unsure (1)..(411): unsure at all Xaa locations
MAACFSTXFEVYVAGGVVGFLVKTGWANMHSAAMFVSASVAGMALGTWLAGVLGDRFGRRFTYQFNLLLFGLASFAAAVVSSMDQLIVARFVMGIGLGAEVVVSYGTLVEYIPPAHRGRWSSGLSLCGNAALFVAALVGYFVIPDLGWRWLFGGVGVAALIIWYMRKAVPESPRWLESQGRFEEADRILDDIEQELAYVGQPGEAAVPAYAVVPDLPRRMLVPRFIIGIMMSVAGNAAFYGLIVWLPTFFFRQGFTVGSSLGYSMVMSAGGPAGALVGMAIADRVRRKRAIIVLSIVAALLGLVYPLCKTPLSVLVTGFLLVSALYAFVAVAWASYLPELFPTRIRLRASAVCNVTGRLAAIAMPFAVVQLYAKFGVFGVVGALGGILLAQAAVIALLGIDTNNVSLEELT

SEQ ID NO: 23729 - protein, 474 aa, Burkholderia fungorum
MSTHLRTSVAARLERLPDSRYLRTAVILISLGTFWDSYMLFSVGPISAHFFAYLGQPHLATELPLALFLGTFVGAVCLSTVADTIGRRAAFTLDLCTLAVGALVAAFSPNATVLLIALFVAGIGTGAELPLSTTYVQELSPAKARGKKSSFALTIGFFGGTVGGFASLLLVPLTNLPIQGFRIALLLAALGGFSSLLLRIRLPESPRWLERVGRHEEADRVVEEIERRVMRDTGLTALPPVPAGSHDVASGASPLRILISRAYLRRTISAGAIELLQGFGAYGFATFVPFFLYSRGYSVIHALAYTAIIQISYPTGCLISAYITDRIQRKWGMALAYTINVVFGLCFLLVDSTFLIVLFGFLTETMIFINGPLLHTYEAEIYPTGVRARGAGICFALSRLGGFLAPIVASILLAGGANGGWLIAIGAAAWFGCALVAAFVAVDTTNISLEDLEAKVGDASEADAAAGYGMVKKR

SEQ ID NO: 23730 - protein, 223 aa, Bacillus subtilis
MKNTPTQLEPNVPVTRSHSMGFVILISCAAGLGGLLYGYDTAVISGAIGFLKDLYSLSPFMEGLVISSIMIGGVVGVGISGFLSDRFGRRKILMTAALLFAISAIVSALSQDVSTLIIARIIGGLGIGMGSSLSVTYITEAAPPAIRGSLSSLYQLFTILGISATYFINLAVQRSGTYEWGVHTGWRWMLAYGMVPSVIFFLVLLVVPESPRWLAKAGKTNEA

SEQ ID NO: 23731 - protein, 457 aa, Lactobacillus brevis
MRKVSTGFVYFFGALGGLLFGYDTGVISGAILFIQKQMNLGSWQQGWVVSAVLLGAILGAAIIGPSSDRFGRRKLLLLSAIIFFVGALGSAFSPEFWTLIISRIILGMAVGAASALIPTYLAELAPSDKRGTVSSLFQLMVMTGILLAYITNYSFSGFYTGWRWMLGFAAIPAALLFLGGLILPESPRFLVKSGHLDEARHVLDTMNKHDQVAVNKEINDIQESAKIVSGGWSELFGKMVRPSLIIGIGLAIFQQVMGCNTVLYYAPTIFTDVGFGVSAALLAHIGIGIFNVIVTAIAVAIMDKIDRKKIVNIGAVGMGISLFVMSIGMKFSGGSQTAAIISVIALTVYIAFFSATWGPVMWVMIGEVFPLNIRGLGNSFASVINWTANMIVSLTFPSLLDFFGTGSLFIGYGILCFASIWFVQKKVFETRNRSLEDIEATLRAKTGEDAAELSTTK

SEQ ID NO: 23732 - protein, 442 aa, Pseudomonas putida KT2440
MRTLDVHPIIDNARFTPFHWMVMAWCGLLLIFDGYDLFIYGVVLPVIMKEWGLTPLQAGALGSYALFGMMFGALAFGSLADRIGRKKGIAICFALFSGATILNGFASNPSEFGIYRFIAGLGCGGLMPNAVALMNEYAPKRLRSTLVAIMFSGYSLGGMLSAGVGIFMLPRFGWESMFFAAAVPLLLLPVILYYLPESIGFLVRQGRIEEARTLLKRLDPDCDVQADDVLQAADRKGSGASVLELFRNGLAIRTLALWVAFFCCLLMVYALSSWLPKLMANAGYSLGSSLSFLLALNFGGMAGAILGGWLGDRYNLVKVKVAFFIAAALSISLLGVNSPMPVLYLLIFIAGATTIGTQILLYAGAAQMYGLSVRSTGLGWASGIGRNGAIVGPLLGGALMGINLPLQLNFIAFAIPGAIAALAMAVHLASGRRHAQTLAAQA

SEQ ID NO: 23733 - protein, 448 aa, Pseudomonas putida KT2440
MNQAQTNVGKSLDVQSFINQQPLSRYQWRVVLLCFLIVFLDGLDTAAMGFIAPALSQEWGIDRASLGPVMSAALIGMVFGALGSGPLADRFGRKGVLVGAVLVFGGFSLASAYATNVDQLLVLRFLTGLGLGAGMPNATTLLSEYTPERLKSLLVTSMFCGFNLGMAGGGFISAKMIPAYGWHSLLVIGGVLPLLLALVLMIWLPESARFLVVRNRGTDKVRKTLSPIAPQVVAEAGSFSVPEQKAVAARNVFAVIFSGTYGLGTVLLWLTYFMGLVIVYLLTSWLPTLMRDSGASMEQAAFIGALFQFGGVLSAVGVGWAMDRFNPHKVIGIFYLLAGVFAYAVGQSLGNITLLATLVLVAGMCVNGAQSAMPSLAARFYPTQGRATGVSWMLGIGRFGAILGAWSGATLLGLGWSFEQVLTALLVPAALATVGVVVKGLVSHADAT

SEQ ID NO: 23734 - protein, 450 aa, Pseudomonas putida KT2440
MSSLNMYTLTEESKFNRFHGLILFWCVLILIIDGYDLAVVGAALPAIMADMQIDATSAGVMAGSALFGTMLGAIFLGTLADRIGRPKMIAICVALFSVFTAAAGFTDSPLTFSIMRFIAGLGIGGVLPICTAQMGEFSPLKVRTRLVTIVFAGYSVGGILVALTGKQLIESYGWQYVFYVAVLPVVLIPFILKSMPDSIGFMLKQGRQDELKVIARRLRPDLVIKDDTQFVGNPQIISAQDKPVRSLFLEGRGYSTVMIWMAFMTGLFMVYALNSWLTKLMAMAGFSLGSALNFVIVFNLGSIFGAILGGWLSDKFSIKHVLVVFYVVGAVALTLLGYTRSTELLFVVVFIVGASTLGTQLLAYAYAGDFYPSTIRSTGVGFASGVGRVGAIVAPVLIGALVSMALPLEQNFMAIALAGLVGAVAVTMINQSRSDSAVVRKKATVAHELT

SEQ ID NO: 23735 - protein, 448 aa, Rhodococcus sp. 19070
MADNTTAWASPRHRRTVIWVVALATLAIIFDGYDLVVYGTILPTLMADPSQIGAISAQQGGALGSYALIGVMVGALFTGAFGDRLGRRKMMLINIVWFSVGMGAAAMATSITSFGILRFFTGIGVGGLVATAGAVVAEFAPPGKRNLFNAIVYSGVPAGGVLASLLAIVLRDTIGWRGLFWIGALPLVILLPLALVKLPESPMWLQARGRTDEAAAVCDKFGLPLPTIAPAPAEKVGFAALATRRYAWGTTLLGLMSFAGLLLTYGLNTWLPKIMADAGYNAKGSLAFLLVLNGGAIIGGLLASRIADGRGPQPVIATTFGLAGLALILLTFGFPLPVLLTAVAIAGVGTIGTQVLIYGFVSNYYETAARGAGVAWCAGFGRLGGIFGPIIGGLLIGAGLSNDVSFYIFAGIAVAGALVTVFVPIRRGAQYVARTPEAAAASPTTVEV

SEQ ID NO: 23736 - protein, 576 aa, Anopheles gambiae str. PEST
NSNPSNRTGQFRANPSCTQNAHCSYNNFGKAQAKSQSKMSYGDISYGLQKQVSVMSMNLSAKLDDLQRGDRHLETTVALCEIRTQLQELTKSVESCQTEVSEVKRDMVAIKHELDTVQQVKEEIEELREYVDRLEEHTHRRKLRLLEQGLTFFLTYAIFAAVLGMLQFGYNTGVINAPEVNIENFMKDVYKDRYGEDISEEFIQQLYSVAVSIFAIGGMLGGFSGGWMANRFGRKGGLLLNNVLGISGACLMGFTKMSHSYEMLFLGRFIIGVNCGLNTSLVPMYISEIAPLNLRGGLGTVNQLAVTVGLLLSQVLGIEQILGTNDGWPVLLGLAICPAILQLLLLPICPESPRYLLITKQWEEEARKALRRLRASNQVEEDIEEMRAEERAQQSESSISTIELICSPTLRAPLIIGIVMQLSQQFSGINAVFYYSTSLFMSSGLTEESAKFATIGIGAIMEMIDWMSYLSVVSTLAFVVFFAVGPGSIPWMITAELFSQGPRPSAMAIAVLVNWMANFVVGIGFPSLKTALENYTFLPFSVFLAIFWIFTYKKVPETKNKTFEEILALFRHGNGR

SEQ ID NO: 23737 - protein, 461 aa, Agrobacterium tumefaciens str. C58 (Cereon)
MNIMQPLRADATAVADPQADISARLERLPITREVFWARNIVGAATFFDGYTVIAIAYAMPVLVREWGLTPSQTGMILSMGYLGQLIGAILFGWLAERIGRLKVLLFTILLFVSMDVACLFAAGAGMMMAFRFVQGIGTGGEVPVASAYINELIGSKGRGRFFLLYEVMFLLGLVGAGLIGYFMVPLYGWKAMFIVGLVPAMLMIPLRWFLKESPRWLAATGRYDEANVIVKRMEESARAAGKALPEPRIIATPAKRVSDWRELFQGIYLKRTLSIWAMWFCAYMVANGTITWLPTLYRQTFNLPLETSILYGFMTSAAGVVAAVICALLIDKVGRKRWYAGALLLAPVPLAILAWLGATSPMQVLIFAGLAYAIVQTVTFSLYLYSAEIYPTRMRAIGTGAGSAWLRLGSSAGPMLVGFVMSSMGIQYVFATFAFILIIGAVVTMLFAVETKGKVLEELSP

SEQ ID NO: 23738 - protein, 388 aa, Magnetospirillum magnetotacticum
PPHSLPRGSLSLLLTSVFAGGAVGAPVFGLLGDRFGRRRALQASLGLMAIGSIAAAMSSGLTSLTIARAVSGFAIGGFPPLVATYLAEVMPPRRRGAMLMTCAGIGFLGGSAVISLIQVLSPAAPLGIEPWRWALIVGAVLSALAAALFAFVSESPRWLASTGRAREADRACREFEQAARMRPAAAPAGPFPEPPHSGQADARPPLARRSATRRTALFVALYALAPWATLGFPLLSAVVLLEKGYRIDQSLLFAALSMLGPPLGTLLAALVIDRLERRACLAALAGTMAILGTVFAASDAFLTLVLVGIAFNTAAASYGAILSIYATEVLATRLRASVLTWAWAGGRVASALAPFVFCLPWPPTVPRAVNRVRASPAGGASGGPRVSA

SEQ ID NO: 23739 - protein, 459 aa, Shigella flexneri 2a str. 2457T
MEQITKPHCGARLDRLPDCRWHSSMFAIVAFGLLVCWSNAVGGLILAQLKALGWTDNSTTATFSAITTAGMFLGALVGGIIGDKTGRRNAFILYEAIHIASMVVGAFSPNMDFLIACRFVMDVGLGALLVTLFAGFTEYMPGRNRGTWSSRVSFIGNWSYPLCSLIAMGLTPLISAEWNWRVQLLIPAILSLIATALAWRYFPESPRWLESRGRYQEAEKVMRSIEEGVIRQTGKPLPPVVIADDGKAPQAVPYSALLTGVLLKRVILGSCVLITMNVVQYTLINWLPTIFMTQGINLKDSIVLNTMSMFGAPFGIFIAMLVMDKIPRKTMGVGLLILIAVLGYIYSLQTSMLLITLIGFFLITFVYMYVCYASAVYVPEIWPTEAKLRGSGLANAVGRISGIAAPYAVAVLLSSYGVTGVFILLGAVSNIVAIAIATIGIETKGVSVESLSIDAVANK

SEQ ID NO: 23740 - protein, 225 aa, Microbulbifer degradans 2-40
MATISVSTRVALCVALGGFIFGFDASVISGVVPFISKLFGLSDWQIGAVVSAPTLGAVFSAMGVSTLADRFGRKPILISIAAIYAISAAYSALAPNFESLVIARFIGGLGFGSLVLAPIYISEIAPPHQRGRLVSFNQLNIVVGFSIAYFVNYFIVQAVSNAYSWAPPQSMVSAPWRWMLGLELLPALAYIALLFKIPESPRWLMLNNYSARATDVVKKSSQAIM

SEQ ID NO: 23741 - protein, 422 aa, Oenococcus oeni MCW
MSKPDQLNLTPGLQGVVSSSLVLGAFFGALGCGRIADKFGRKQTLRWIAALFTSSTILCALSMNFLFMSFFRFALGLSVGAASSLSPMYLAEISPEPVRTINVNKNAIFIVLGQLSAFCMNAFLGNIWGNWNPIWRIMIVSASIPAIILWINSFHIVGSPHWLLLKKRFKKARKLFSKLGFEKSTFDGIEQESKTKSKKDDDISWKSILKKPSLVYLLISGILIALIQQISGVNTVMYYGTILMEKVGMGQSGSLYANILIGLVSFVASIFGTRLIARFDHHRMLLISLFGNILFLALLGLVLRLSLFTQTITNALVLIFLALFLASHQGIVSPVTWLIMSEMFPGKIKARFMSIATATTWITNFIISLIYPLLISAVGTAVVFFIFAASNGVSALLSIFVLNAKEIQRAYRKNDLMSQESN

SEQ ID NO: 23742 - protein, 449 aa, Pseudomonas syringae pv. syringae B728a
MTLSAGSPAPSTLDVQAFINAQPLSGYQWRVVALCFLIVFLDGLDTAAMGFIAPALSQDWGIDRASLGPVMSAALIGMVFGALGSGPLADRFGRKVVLVVAVLLFGLFSLASAYSSNIDQLLVLRLLTGLGLGAAMPNATTLLSEYTPERLKSLLVTSMFCGFNLGMACGGFVSAKLIPSMGWHSLLMLGGILPLLLGLVLMVWLPESARFLVVRNRGAERIRKVLAPIAPKALAGITDFSVPEQKTVSSRNVLKVIFSGTYSAGTLLLWLTYFMGLVIVYLLTSWLPTLMRDSGASMEQSAFIGALFQFGGVLSAVGVGWAMDRYNPHKVIGCAYALAGVFAWLVGQSLGNVALLATLVLLAGMCINGAQSAMPSLAARFYPTQGRATGVSWMLGIGRFGAILGAWAGATLLGLGWTFEQVLTALVIPAALAAIAVLIKGWVSHSDAT

SEQ ID NO: 23743 - protein, 459 aa, Pseudomonas fluorescens PfO-1
MDTGNFSAADRLERLPVSGYHRIIFIIIALAFFFDSMDLAMMTFLLGSIKAEFGLSSAQAGLLASSSFFGMVLGASLSGLLADRFGRKPVFQWSIVLWGLASYLCSTAQTVESLTLFRILLGIGMGMEFPIAQSMLSELIPAQRRGRYIALMDGFWPLGFVAAGVLSYFLLPLIGWRDIFLVLAVPAVFVLAIRFFIPESPRWLEQAGKHDEADKVLRGIEARVQASLGGAALPEPVRLPRSVTPPGHFLSALKQIWSPLYRQRTTMIWSLWFFALLGFYGLTSWLSALLQQSGFAVTQSVYYTVLISLGGIPGFLMAAWLVERWGRKPVCIVTLLGGGVMAFLYGQSAVFGGNVALLIGTGLLMQFFLFGMWAVLYTYTPELYPTSARATGSGFASAIGRVGSLLGPLVTGLVFPITGQGGVFALGALCFTIAAGVVWLFGMETRGKTLEELTEAVVR

SEQ ID NO: 23744 - protein, 469 aa, Pseudomonas fluorescens PfO-1
MTVPLSGRPPFDCVFLRGIKIMNQPQSAVGHCLDVQSFINAQPISRYQWRVVILCFLIVFLDGLDTAAMGFIAPALSQDWGIDRASLGPVMSAALIGMVFGALGSGPLADRFGRKVVLVGAVFLFGAFSLASAYATNVDQLLVLRFLTGLGLGAGMPNATTLLSEYTPERKKSLLVTSMFCGFNLGMAGGGFISAKLIPAFGWHSLLLIGGILPLILTVVLLLWLPESARYLVVRNRGTDKVRKTLAPIDPAIVAQAASFSVPEQKTVKARNVFAVIFSGTYSVGTLLLWLTYFMGLVIVYLLTSWLPTLMRDSGASMEQAAFIGALFQFGGVLSAVGVGWAMDRFNPHKVIGIFYLLAGVFAYAVGQSLGNITLLATLVLVAGMCVNGAQSAMPSLAARFYPTQGRATGVSWMLGIGRFGAILGAWMGATLLGLGWNFEQVLTALVIPAGLATAAVVIKGLVSHADAT

SEQ ID NO: 23745 - protein, 446 aa, Pseudomonas fluorescens PfO-1
MRVIDVNQFIDKARFSRFHWGVVTLCALLLIFDGYDLFIFGVVLPAIMREWQLTPIQAGALGSYALFGMMFGALAFGSLADRIGRKKSIAICFTLFSSATLINGFASNPTEFGICRFLAGLGCGGLMPNAVALMSEFAPRRLRSTLVAVMFSGYSLGGVLAASVGIYMLPLFGWQSMFFAAAVPLLLLPMILGFLPESIGFLIRAGKEGQARRILSKVDPASAPSDSDTLRQADSEGRGVILLALFRERRASRTLCLWVAFFCCLLMVYALSSWLPKLMANAGYSLGSSLTFLLALNFGGMAGAIFGGWLGDRYNLGKVTVMFFLTAALSISLLGFKSSTALLYLLISVAGATTIGTQILLYAATAQFYGMSIRSTGLGWASGIGRNGAILGPLLGGALLGIGLPLPLNFVAFAVPGAIAAIAMALFTLVGKRSVADSSVLMAAKP

SEQ ID NO: 23746 - protein, 477 aa, Pseudomonas fluorescens PfO-1
MDQPMTAHAPAAQRDGIDPIRAAQISARIDRLPAVATIWRLVALLSIGGFFELYDLFQTAYISPGLIRDGIFAIGNQGVFGFSDQAAFASATFLGLFLGASLLSPMADRFGRRAIFTFALVWYTVATVLMGVQSSALGIICMRFLVGIGLGIELVTIDAYLSELVPKRMRSSAFAFAFFVQFLSVPAVALMSWWLVPQAPFGISGWRWVVLASAVFALFIWWLRKRLPESPRWLAQHGRFDEANRILDGIEARCEKDHRQPLDAPEAVAVDVEGKGRFADIWQPPYRRRALMLIVFHIFQAIGFFGFGNWLPALLSGQGVSVTHSLMYAFIITLAYPLGPLLFVKFANRFENKWQIVGSALGAMTFGTLFALQTSAVGLIFCGVMITFCNAWLSFSYHSYQSELFPTNIRARAVGFCYSFSRLSTVFSSLLIGLFLDHFGTPGVLAFIVASMLIVMLTIGCFGPRTRNLALENIAHR

SEQ ID NO: 23747 - protein, 442 aa, Pseudomonas aeruginosa PAO1
MTNPTTSIEDVPLNAFHRLLTLRSGGGSFVDGYVLSIIGVAMLQMTAALQLSSFWQGMIAASALVGIFFGGFLGGWLTDRLGRRRLFFVGPSLFVLASLAQYGVDSAAALFVLRFLIGVAVGIEYPVATALLVEFLPKKYRGPRLATLTILWFAGAAFAYLVGDLILRSGGEDAWRLVLASTAAIGAVLFLLRIGTPESPRWLLSKGRDADAERVIRQVYGEAFSLENLPEQALERKVTIWHLLYAGYGKRMLFVTLFWTCSVIPVFAVYAFAPKVLLALNLKGDWASYGSVAITLLFVIGCIIATRLINRIGRRCMLLHSFLWSGLALLGLGVFHAGSEATILGLFGAYALFIGGAQVLQLVYPNELFPTEIRAFAVGVGTSLSRVGAAVGTYLVPLSLETLGTAQTMYAAALVTLLGLLVTWALAPETRSLNLQQAASLT

SEQ ID NO: 23748 - protein, 455 aa, Pseudomonas aeruginosa PAO1
MPDAPASAAERLERLPLSPYHRLVFVIIALAFFFDSMDLAMMTFLLGSIKAEFGLDSAQAGLLASSSFFGMVIGAALSGMLADRFGRKPVFQASIVLWGLASYLCSTAGDLDSLTFYRVLLGIGMGMEFPIAQSLLSEMIPASRRGKYIALMDGFWPLGFVAAGCLSYFLLPLTGWRSIFLVLALPAVFVLAIRFLIPESPRWLEQAGRREQADRVLRDIEARVMRSLGLTELPPPLRQPQRERSRPGFFSAFAELWSPAYRRRTLTVWGLWFFALLGFYGLTSWLSALLQQSGFAVTQSVYYTVLISLAGIPGFLCAAWLVESWGRKPSCVLMLLGGGAMAYAYGQTAVFGGSLALLIGFGLAMQFFLFGMWAVLYTYTPELYPTSARATGSGFASAVGRIGSLLGPLVTGLVLPLTGQGGVFTLGALCFGVAALVVWAFGIETRGRTLEELAG

SEQ ID NO: 23749 - protein, 448 aa, Pseudomonas aeruginosa PAO1
MNSPSLPAVERLDVQAFINAQPLSPYQWRIVLLCFLIVFLDGLDTAAMGFIAPALTQDWGIDRASLGPVMSAALIGMVFGALGSGPLADRYGRKLVLVAAVFLFGLFSLASAYSTNVEQLLALRFLTGLGLGAAMPNATTLLSEYTPERLKSLLVTSMFCGFNLGMACGGFVSAKLIPLFGWHSLLLLGGLLPLVLAVVLLFRLPESARYLVVRNRGSERVRQVLAPIAPAQVALARSFHVPEQQTVQARNVFAVIFSGTYSAGTLLLWLTYFMGLVIVYLLTSWLPTLMRDSGASLEQAAFIGALFQFGGVLSAVAVGWAMDRFNPHKVIGLFYLLAGVFAWCVGQSLGQVTLLATLVLLAGMCINGAQSAMPSLAARFYPTQGRATGVSWMLGIGRFGAILGAWIGATLLGLGWNFEQVLTALVLPAALATAAVLLKGLVSHADAG

SEQ ID NO: 23750 - protein, 446 aa, Pseudomonas aeruginosa PAO1
MNRQSAAAVIDAARFNRTHWLILGWGCFIMLFDGYDMVIYGSVVPRLMQEWQLSPVQAGTLGSCALFGMLFGGTLLAPLADRFGRRRLVIATTLLASLAAFLTGHARDPLELGAGRFFTGLALGALVPSAINLISEFAPAGRRSTLVTVMSAFYSVGAVLSALLAIAMIPAWGWQSVFYVAVLPVLAVPLMLRWLPESAAFLELKGRRAELDALLRKVDPDYRPGAERANAVAAEAPSGRVAQLFEGRQAVGTLLLWVAFAMCMLMSYGLNTWLPKLMAGGGYALGSSLAFLVTLNVGATLGALFGGWLADRLGAGRTLVLFFALAAASLAALGLGPGPWLLNGLLVVAGATTIGTLAVIHAYAAQFYPAWVRSTGVGWAAGVGRLGAIAGPMLGGSLLALELPFQQNFLAFAAPGVIGALAIACIHLRPRVPAEASVDATAKKPL

SEQ ID NO: 23751 - protein, 449 aa, Pseudomonas syringae pv. tomato str. DC3000
MTLTASGPATGTLDVQAFINAQPLSGYQWRIVALCFLIVFLDGLDTAAMGFIAPALSQDWGIDRASLGPVMSAALIGMVFGALGSGPLADRFGRKVVLVVAVFLFGIFSLASAYSSNIDQLLVLRLLTGLGLGAAMPNATTLLSEYTPERLKSLLVTSMFCGFNLGMACGGFVSAKLIPSMGWHSLLMLGGILPLVLAVVLMVWLPESARFLVVRNRGAEQIRKVLAPIAPKAVAGVTAFTVPEQKTVSSRNVLKVIFSGTYSAGTLLLWLTYFMGLVIVYLLTSWLPTLMRDSGASMEQSAFIGALFQFGGVLSAVGVGWAMDRYNPHKVIGFAYALAGVFAYLVGQSLGNVAVLATLVLLAGMCINGAQSAMPSLAARFYPTQGRATGVSWMLGIGRFGAILGAWAGATLLGLGWNFEQVLTALVIPAALAALAILIKGWVSHSDAT

SEQ ID NO: 23752 - protein, 481 aa, Bradyrhizobium japonicum USDA 110
MRSAHLGEDTMSVVGIDTGFELGAAPSVPDEISRRLEAMPGSPYVWRLVILLSLGGCFEIYDLFLTGYIAPGLSRSGLLSTTTQAFFGFAGIGAFVAATFAGLFVGTFFLGFLADRFGRRAIFTYALLGYTAASVIMACQTSPEGLLFWRFLAGIGIGVEVITIDAYITELVPSRMRGRAFAVNQSIMFVAVPVVAFLAWWLVPLAPYGVEGWRWVVLIGAAASMIIWVLRLFLPESPLWLARHGRNEEALRILTTLEAASGGAGSRPATSPARQAVRSTTNVSFADLFRPPYLSLVVLFMVFNLCQAFGFYGFANWVPTLLVEKGINVTKSLQYSFIVAFAYPIAPLLASSFADKFERRWIIAGACVAIIVFGMAFAQLTEPALLIVCGVLLTACNTTMSYAYHAYQTEVFPTQIRARASGLVYSMSRLSATFSGFIVAYMLKEGGVTGVFGLITAAMLIVVIAMALFGPNVRGKPLDAV

SEQ ID NO: 23753 - protein, 454 aa, Bradyrhizobium japonicum USDA 110
MSTMAMPQPTASEAAVRYLITNYSPKGNKVGWLMMASILVEAWDLYSIAFVLIFIKEQYNPDPLMLGLAAAGTQGGALIGALLGGWLSDKIGRRVMFLVTMVLFIVLALAQAFVPTVGWLVVIRFLLGIPLGSDISTGYTYIMESMAKGEREVMGNRWQFMFAVGEVLTIGVIVIFLLIDMQHEMLWRVTLGLGAVPALIILIMRHDVPETAVWLVQKGRYREAKQVAREMFNDNLDMLPDQDVVVPKTSTRAFLADLKKDPIRWRATVYGWIACFTQASEFSTFAFYLPVLFVMVGVSSVLGINLVTMALFSFAALSGWVGPLLTPKIGHRGIAIAGFSIVMASLLVAAFALYTDNKILLPFAAAAMLWGHYWDASNCMTIPTMVAKPKYRGTASGFAYMFVKLPSFLAIFLFPTVFAAIGQANATLMVAIFPLIGLLAAIFILPEVYGYEND

SEQ ID NO: 23754 - protein, 517 aa, Bradyrhizobium japonicum USDA 110
MIGSPLATSCEPGSLPLVRPSNAMELQQSQALNYGPAVSAVATDRIIETSIPSRLDALPWSGFHTRVVLALGITWILDGLEVTLAGALSGALKQSPSLQFSNLDLGIANSAYLAGAVLGALGFGWLTDRIGRKKLFFITLALYLSATAATALSWDIASYALFRFLTGAGIGGEYTAINSTIQELVPARYRGWTDLVINGSFWIGAAMGAVAAIVLLDPALIGPDLGWRLAYLIGASIGLVVLLMRMWIPESPRWLMIHGRPDQAHAIVDEIERSVIGHDQDASDRRFTRIRLKMRDHTPIREVMHTLFTVYRQRALVGLVLMGAQAFFYNAIFFTFALVLTDFYGISADHVGWYLLPFAAGNFLGPLLLGRLFDTLGRRAMIMFTYGASGLLLALSGYLFSIGALSAQGQTIAWMVIFFFASPAASAAYLTVSETFPLEVRALAIAVFYAVGTGIGGVIGPALFGALIDTGSRTSVFAGYLLGAFLMIAAAIVAWRYAVSAERKSLEQIARPLAFME

SEQ ID NO: 23755 - protein, 518 aa, Bradyrhizobium japonicum USDA 110
MRHRKLQRPFQHQERDGRDPRAAVRLVSRHGQSEATELAKLQAADRPEKVGRINGDNSQGRASMSTSVNAGGRLDRLPVGPFHRRIMLLIGIGMFFDGFDIYIAGTVLSVTLKTGFSTLAQNAAFISATFVGMMLGSFGTGFLGDRYGRRFTYQFNLLLFGIASLAAAFSPNMAFLIACRFVMGVGLGAENVVGYSTMTEFVPARTRGKWLGFTAVCVVTGLPVALLVASVLVPQFGWRSMFVLGGVGALVVWYMRKSLPESPRWLEAVGRTAEAETLMQAIEKEAAQGQPLPPPAATAPAPVSPDLGTLFTAPLLSRMIVGAVCLITINTLLYGFVTWLPVFFVKQGLSIATSFGYSLLMAIGAPVGAAIGALTADRWGRKPTIIGASLIAVALGVLYPMISDPILLPAVGFALTVPIYVLVALLFGIYIPELFPTEVRLRASGIVNTLGRGATIVTPFLVVSLFETRGVAGVMALMIGLLVVQIITVWALGIEPRHRSLEELKAEESASPVLKEAS

SEQ ID NO: 23756 - protein, 436 aa, Bacillus cereus ATCC 14579
MNIMQPSAPPHLESTETIFPSSITKLVVFICWLAILADGYDLGIYGAVLPKLLEDKSWALSPAHAGTIASYALLGMFIGAILVGTITDLIGRKWTLICCLALFSITMGLAAIAPSPELFGLSRFIGGIGLGGVIPTASALTVEYSPKKRQSFIYALMFTGYPLGIVLGAILSMLMLEDFGWRIMFGIGMIPLLLIPFIIRYLPESIQFLLSRNRQEEVNQILNRFQIEFHVKDKTHQDPSTIRKKNGFFTLFSKEYIKATLLFWITYIMGMFLIYGLNTWLPQMMRQAGYPLGSSLSFLLMLNITAAIGALFAGAIADRIGAKIVISISYLMAAICIGLLTIKPSVTIIYLLIGLAGIGSVGITQILNAYVTQYFPSHIRATSLGWGLGLGRVGAIAGPILVGIIMTMQYDLAWNFYLFSFAGLIAAISVFFIPTK

SEQ ID NO: 23757 - protein, 488 aa, Sulfolobus solfataricus
MYKARKLTFIRYFYELTGVSTSMSSKLDEYLARIDRLPTWGLSYAVLWALGIGYFATLYDAVSNLGYALPFIPFINATQASIIVSVGLAGYIAGSIGFGVASDRIGRRPILITTFALLGIGSLGMGLATNYFMLFIFRLLEGIGIGAALNLAMVYVAEFSPSMKRGKYANWIFISGWTAVGVGTVAAAFIVTINPTVGWRIIFLLPAVLSLMTTVVLTILSPESVRILVKKGKVQEVEKIVNKMEEISMRRARMESLPQPKIIHYEETPSSSQLKILRESKYLKRLISLTVFWFFIYFIQYTSTGLGPTFVKVVIGFSTAQYAEYIRLSGFAAIGATIVSFILLSVVEKTDRRLLTQIGGIGFLVSSFVSTYLLLNKELIVWFIAYFLLEFVVNPPYLAGYLMSSEAFPTAARSTAFAITDGIGHLGGVIGPLLLFPLIRIIGPLPAWVVLGLPVPFAAALLWFTIPKTVKVRLEEVNEAYREGTAQT

SEQ ID NO: 23758 - protein, 566 aa, Kluyveromyces lactis
MSSNLSEKAVDQQKEFGLLKSTSSVDSVHEVEAGVKVGEDDDNYFFSEDQILTQIKVYEDEIANTPVTKTLRQRMRRMEFCEVNFSNKTYMVIMLGFFASFAGILSGVDQSTISGASYGMKASLKLTSDEDSLISSLMPLGAVGGSILLTPLSEYFGRKVALVISCIFYTIGGILCAAAQDVHTMYAGRFLIGVGVGIEGGGVGVYIAESVPSTVRGSLVSLYQFNIALGELVGYVIGVIFFDVKGGWRYMLGSSLVFSTILFVGLFFLPESPRWLIHKGYDVEAYKVWRRLRDTSDLGNKREFLEMKHAAEQDRQLKEQESRFKSMFDLILIPRNRRALLYSIMMVSLGQLTGINAIMYYMSTLMGQIGFSPKQAVAMSMVGGAALLIGTIPAILYMDKFGRRPWSMTIIGFSVGLVLVGVGYQIDLNTNLAAAEGVYLTGQILYNIFFGTYATLTWVVPSESFSLATRSIGMTICSAFLYLWAFTVTYNFNKMKDAFTYTGLTLGFYGGIAIVIGIPYQLLFMPETKDKTLEEIDDIFEMPTRQLVKQNLKNLKDYVSGNRKSI

SEQ ID NO: 23759 - protein, 587 aa, Kluyveromyces lactis
MADHSSSSSSLQKKPINTIEHKDTLGNDRDHKEALNSDNDNTSGLKINGVPIEDAREEVLLPGYLSKQYYKLYGLCFITYLCATMQGYDGALMGSIYTEDAYLKYYHLDINSSSGTGLVFSIFNVGQICGAFFVPLMDWKGRKPAILIGCLGVVIGAIISSLTTTKSALIGGRWFVAFFATIANAAAPTYCAEVAPAHLRGKVAGLYNTLWSVGSIVAAFSTYGTNKNFPNSSKAFKIPLYLQMMFPGLVCIFGWLIPESPRWLVGVGREEEAREFIIKYHLNGDRTHPLLDMEMAEIIESFHGTDLSNPLEMLDVRSLFRTRSDRYRAMLVILMAWFGQFSGNNVCSYYLPTMLRNVGMKSVSLNVLMNGVYSIVTWISSICGAFFIDKIGRREGFLGSISGAALALTGLSICTARYEKTKKKSASNGALVFIYLFGGIFSFAFTPMQSMYSTEVSTNLTRSKAQLLNFVVSGVAQFVNQFATPKAMKNIKYWFYVFYVFFDIFEFIVIYFFFVETKGRSLEELEVVFEAPNPRKASVDQAFLAQVRATLVQRNDVRVANAQNLKEQEPLKSDADHVEKLSEAESV

SEQ ID NO: 23760 - protein, 528 aa, Kluyveromyces lactis
MSTNNRLLPHGRADELNNLENASSNNKGVTFTPHLLLSMLVACLGSLQYGYHMGELNAPEDYITCKAELNPGYADSFLGRLGLAQCIPLTDSQFGLITSVFSVGGLIGSLVAGPLADSYGRKPISYWNCSVGILGAVCLFSSNNYLGMLFGRLLAGISCGSLIVVTPLFINEMSPVHLKGSLGSMNQVSINCGILVTQSLAMLWANMLQWRWILLFGGLISLLNFGLLFRINESPRWLVSKGNMTDAEDVLSQLRGNSRQESRQEIDGWLQGSQPVRTFSDLEAHTNSQMNLGSNLNLERPSSTRSSLRDSESITVVEYWKDPKYKYPRRVITTILMAQQFCGINSIVFYGVKVIKKAFPDTAIIINFAISIVNVLMTFFSSPLVDHWGRKPLLISSSTLMSICSFMICFGIVGNAPMILVIFVILYITAFAGGLGPIPFLIISELSHPETVGVAQSYGTTMNWIATFMVGYGFPALNSVMDGYVFLLFSAVAICFSFYVYRFVPETKGKLDYTDIWKSHDPRIAYTQ

SEQ ID NO: 23761 - protein, 276 aa, Gossypium raimondii
WLFRKGREEEAKVILRKIYPADDVEKEIQDLKESVEAEIREEGCAKINIMKLLKTKTVRRGLIAGVGLQVFQQFVGINTVMYYSPTIVQLAGFASNKTALLLSLVTAGLNALGSIVSIYFIDRTGRKKLLLISLFGEAISLGLLAGVFHETTSHTPMVSRIQTSHFSNYTCPDYSSATNPGAWDCMKCLKALSPDCGFCASPTDKVKSHDISIFLQSLVFVFPSLIGFLLLLQLLPGACLLSNDTVKDLCHDESRLWYTRGCPSKYGWLALVGLAL

SEQ ID NO: 23762 - protein, 443 aa, Pseudomonas putida
MRTLDVHPIIDNARFTPFHWMVMAWCGLLLIFDGYDLFIYGVVLPVIMKEWGLTPLQAGALGSYALFGMMFGALAFGSLADRIGRKKGIAICFALFSVATILNGFASSPSEFGIYRFIAGLGCGGLMPNAVALMNEYAPKRLRSTLVAIMFSGYSLGGMLSAGVGIFMLPRFGWESMFFAAAVPLLLLPVILYYLPESIGFLVRKGRTEEARALLKRLDPQCDVQADDVLQAADRKAGGGASVLELFRNGLAIRTLALWLAFFCCLLMVYALSSWLPKLMANAGYSLGSSLSFLLALNFGGMAGAILGGWLGDRYNLVKVKVAFFIAAALSISLLGVNSPMPVLYLLIFIAGATTIGTQILLYAGAAQMYGLSVRSTGLGWASGIGRNGAIVGPLLGGALMGINLPLQLNFIAFAIPGAIAALAMAVHLASGRRQARAIAAQA

SEQ ID NO: 23763 - protein, 448 aa, Pseudomonas putida
MNQAQNSVGKSLDVQSFINQQPLSRYQWRVVLLCFLIVFLDGLDTAAMGFIAPALSQEWGIDRASLGPVMSAALIGMVFGALGSGPLADRFGRKGVLVGAVLVFGGFSLASAYATNVDQLLVLRFLTGLGLGAGMPNATTLLSEYTPERLKSLLVTSMFCGFNLGMAGGGFISAKMIPAYGWHSLLVIGGVLPLLLALVLMVWLPESARFLVVRNRGTDKIRKTLSPIAPQVVAEAGSFSVPEQKAVAARSVFAVIFSGTYGLGTMLLWLTYFMGLVIVYLLTSWLPTLMRDSGASMEQAAFIGALFQFGGVLSAVGVGWAMDRYNPHKVIGIFYLLAGVFAYAVGQSLGNITVLATLVLIAGMCVNGAQSAMPSLAARFYPTQGRATGVSWMLGIGRFGAILGAWSGATLLGLGWNFEQVLTALLVPAALATVGVIVKGLVSHADAT

SEQ ID NO: 23764 - protein, 476 aa, Ralstonia solanacearum
MPATFPAAAQANAAARLERLPFSGYHKRIFIIIAIAFFFDSVDLATMTFVLGSIKKEFGLSTATAGLVASSSFFGMVIGAAVAGLLADRFGRRPVFQWSMVLWGVASYLCSTAQSVEALIAWRILLGIGMGMEFPVAQTLLSEFVPTANRGRLIALMDGFWPLGFITAGIVSYFVLPQFGWRAVFALLAVPAIFVLIVRRAVPESPRWLEHAGRNAQADTVMRGIEAKVMRSLNTTTLPPIVQHSAPQPVRRHSALREIWSAAYRRRTTMVWLLWFFALLGFYGLTSWLGALLQQAGFAVTQSVYYTVLISLGGVPGFLCAAWLVERWGRKPTCIASLLGGGAMAYLYGQSALYGGSVTLLICTGLAMQFFLFGMWAVLYTYTPEQYGTGARATGSGFASAIGRVGSLIGPYVVGVVLPVFGQGGVFTLGAISFAVAALAVWALGIETRGLALEALASEDAAAETAPYSTTADNIS

SEQ ID NO: 23765 - protein, 276 aa, Gossypium herbaceum
WLFRKGREEEAKVILRKIYSADDVEKEIQDLKESVEAEIREEGSAKINMMKLLKTKTVRRGLIAGVGLQVFQQFVGINTVMYYSPTIVQLAGFASNKTALLLSLVTAGLNALGSIVSIYFIDRTGRKKLLLISLFGVAISLGLLAGVFHETTSHSPMVSRIQTSHFSNYTCPDYSSATNPGAWDCMKCLKASSPDCGFCASPTDKVKSHDISIFLQSLVFVFPSLIGFLLLLQILPGACLLSNDTVKDLCHDESRLWYTRGCPSKYGWLALVGLAL

SEQ ID NO: 23766 - protein, 443 aa, Azotobacter vinelandii
MRNIDVNRLVDEARFNRFHWRVLCWCALLLIFDGYDLFIYGVVLPVLMKTWGLSPLEAGALGSYALFGMMFGALFFGPLADRIGRKKGIAICFLLFSGFTVLNGFVRNPLEFGVCRFVAGLGIGGLMPNVVALMNEYAPKKIRSTLVAIMFSGYSLGGMLSAGLGIYMLPRFGWEAMFQAAAVPLLLLPLILWFLPESVGYLLRQGRTEQARAILRRVDPGLALTDDDRLEMAEAKGEGAPVLQLFREGRALRTLSLWVAFFCCLLMVYALSSWLPKMMASAGYSLGSSLSFLLVLNFGAVFGAIGGGWLGDRMNLPKVLVAFFAVAALSIGLLGFKSPTPVLYALIALAGATTIGSQILLYACAAQFYSMAIRSTGLGWASGIGRNGAIVGPLLGGALVGMSLPLQMNFIAFAIPGLLAAIAMALFCLRQPAAGVAPGEALA

SEQ ID NO: 23767 - protein, 581 aa, Mesembryanthemum crystallinum
MVEGGIVKADKTEFTECFRTIGKTPYILRLAFSAGIGGLLFGYDTGVISGALLYIKEDFKEVERKTWLQETIVAMAVAGAIIGAGVGGYLNDKFGRKPAIIIADILFFIGAIIMSLAPAPWMIILGRIFVGLGVGMASMTSPLYISETSPTRIRSALVSTNGLLITGSQFLSYLINLGFTRVKGTWRWMLGVAAVPAFVQLLLMLSLPESPRWLYRKNKVVEAEAILARIYPPEEVEEEMRALKASIEYEMAEEGEIGGGSMLSKVRKAWGNKIVRRGLYAGITVQVAQQFVGINTVMYYSPTIVQLAGFASNSTALALSLVTSGLNAIGSIVSMMFVDRHGRRRLMIISMFGIITCLIVLAIGFFQAAAHAPKISHAESTHFGLNSTCPAYTTTRNPATWNCMTCLQAASECAFCTNKGNQLLPGGCVSRTDAMKVACHGEKRVYFTEGCPSKFGFLAVILLGAYIISYSPGMGTVPWIVNSEIYPLRYRGVGGGIAAVSNWTSNLIVSETFLTLTEALGAAGTFLLFAGFSAIGLVFIYLLVPETKGLPIEEVEHMLENGFKPSIFRGNKDKETKASGT

SEQ ID NO: 23768 - protein, 581 aa, Mesembryanthemum crystallinum
MVEGGVVKVDKTEFTECFRTVGKTPYIMRLAFSAGIGGLLFGYDTGVISGALLYIKEDFKEVAQKTWLQETIVAMAVAGAIVGAGLGGFLNDKFGRKPAMIVADILFLTGAIIMSVAPAPWVIIIGRIVVGLGVGMASMTAPLYISETSPAKIRGALGATNGLLITGGQFVSYLVNLGFTRVKGTWRWMLGVAAVPAAIQVVLMLTLPESPRWLYRQNKISEAEEILGRIYPPEQVKEEMDSLKTSIENEMADRKAVGEGNAFVRAKRAWDNKVVRRGLIAGISVLVAQQFVGINTVMYYSPTIIQLAGFASNSTALALSLVTSGLNAVGSIVSMMFVDRFGRRRLMIISMFAIITCLVVLSGLFYGAAQAAPKISQLESSHFGANSTCPAFASATSPDRWNCMTCLKASDCAFCSNSASEFHPGACVAQTSTMKNACLGEKRIYFTEGCPSKFGFMAIIVLGLYIITYSPGMGTVPWILNSEIYPLRYRGICGGIGAVTLWCANLIVSETFLTLTEALGSSGTFLLYAGFSLIGLIVIFLLVPETKGLPIEDIEKMLEKGFWPSLCGGNKDKDNKEEQQA

SEQ ID NO: 23769 - protein, 276 aa, Gossypium barbadense
WLFRKGREEEAKVILRKIYPADDVEKEIQDLKESVEAEIREEGCAKINMMKLLKTKTVRRGLIAGVGLQVFQQFVGINTVMYYSPTIVQLAGFASNKTALLLSLVTAGLNALGSIVSIYFIDRTGRKKLLLISLFGVAISLGLLAGVFHETTSHTPMVSRIQTSHFSNYTCPDYSSATNPGAWDCMKCLKASSPDCGFCASPTDKVKSHDISIFLQSLVFVFPSLIGFLLLLQLLPGACLLSNDTVKDLCHDESRLWYTRGCPSKYGWLALVGLAL

SEQ ID NO: 23770 - protein, 276 aa, Gossypium barbadense
WLFRKGREEEAKVILRKIYSADDVEKEIQDLKESVEAEIREEGSAKINMMKLLKTKTVRRGLIAGVGLQVFQQFVGINTVMYYSPTIVQLAGFASNKTALLLSLVTAGLNALGSIVSIYFIDRTGRKKLLLISLFGVAISLGLLAGVFHETTSHSPMVSRIQTSHFSNYTCPDYSSATNPGAWDCMKCLKASSPDCGFCASPTDKVKSHDISIFLQSLVFVFPSLIGFLLLLQLLPGACLLSNDTVKDLCHDESRLWYTRGCPSKYGWLALVGLAL

SEQ ID NO: 23771 - protein, 580 aa, Arabidopsis thaliana
MEGGIIHGGADESAFKECFSLTWKNPYVLRLAFSAGIGGLLFGYDTGVISGALLYIRDDFKSVDRNTWLQEMIVSMAVAGAIVGAAIGGWANDKLGRRSAILMADFLFLLGAIIMAAAPNPSLLVVGRVFVGLGVGMASMTAPLYISEASPAKIRGALVSTNGFLITGGQFLSYLINLAFTDVTGTWRWMLGIAGIPALLQFVLMFTLPESPRWLYRKGREEEAKAILRRIYSAEDVEQEIRALKDSVETEILEEGSSEKINMIKLCKAKTVRRGLIAGVGLQVFQQFVGINTVMYYSPTIVQLAGFASNRTALLLSLVTAGLNAFGSIISIYFIDRIGRKKLLIISLFGVIISLGILTGVFYEAATHAPAISSLETQRFNNISCPDYKSAMNTNAWDCMTCLKASSPSCGYCSSPIGKEHPGACWISDDSVKDLCHNENRLWYTRGCPSNFGWFALLGLGLYIIFFSPGMGTVPWIVNSEIYPLRFRGICGGIAATANWISNLIVAQSFLSLTEAIGTSWTFLIFGVISVIALLFVMVCVPETKGMPMEEIEKMLERRSMEFKFWKKKSKLVEKQNQSA

SEQ ID NO: 23772 - protein, 582 aa, Arabidopsis thaliana
MVEGGIAKADKTEFTECWRTTWKTPYIMRLALSAGIGGLLFGYDTGVISGALLFIKEDFDEVDKKTWLQSTIVSMAVAGAIVGAAVGGWINDKFGRRMSILIADVLFLIGAIVMAFAPAPWVIIVGRIFVGFGVGMASMTSPLYISEASPARIRGALVSTNGLLITGGQFFSYLINLAFVHTPGTWRWMLGVAGVPAIVQFVLMLSLPESPRWLYRKDRIAESRAILERIYPADEVEAEMEALKLSVEAEKADEAIIGDSFSAKLKGAFGNPVVRRGLAAGITVQVAQQFVGINTVMYYSPSIVQFAGYASNKTAMALSLITSGLNALGSIVSMMFVDRYGRRKLMIISMFGIIACLIILATVFSQAAIHAPKIDAFESRTFAPNATCSAYAPLAAENAPPSRWNCMKCLRSECGFCASGVQPYAPGACVVLSDDMKATCSSRGRTFFKDGCPSKFGFLAIVFLGLYIVVYAPGMGTVPWIVNSEIYPLRYRGLGGGIAAVSNWVSNLIVSESFLSLTHALGSSGTFLLFAGFSTIGLFFIWLLVPETKGLQFEEVEKLLEVGFKPSLLRRREKKGKEVDAA

SEQ ID NO: 23773 - protein, 580 aa, Arabidopsis thaliana
MVEEASKSEQINITEVWTTTWETPYIMRLALSAGIGGLLFGYNTGVIAGALLYIKEEFGEVDNKTWLQEIIVSMTVAGAIVGAAIGGWYNDKFGRRMSVLIADVLFLLGALVMVIAHAPWVIILGRLLVGFGVGMASMTSPLYISEMSPARIRGALVSTNGLLITGGQFLSYLINLAFVHTPGTWRWMLGVSAIPAIIQFCLMLTLPESPRWLYRNDRKAESRDILERIYPAEMVEAEIAALKESVRAETADEDIIGHTFSDKLRGALSNPVVRHGLAAGITVQVAQQFVGINTVMYYSPTILQFAGYASNKTAMALALITSGLNAVGSVVSMMFVDRYGRRKLMIISMFGIITCLVILAAVFNEASNHAPKIDKRDSRNFAKNATCPAFAPFTASRSPPSNWNCMKCLQYDCGFCSNGAQEYAPGACIVQSADMKALCHSKGRTFFKDGCPSKFGYLAIVFLGLYIIVYAPGMGTVPWIVNSEIYPLRYRGLAGGIAAVSNWMSNLVVSETFLTLTNAVGSSGTFLLFAGSSAVGLFFIWLLVPETKGLQFEEVEKLLEGGFRPSLLRPTTKENQVETP

SEQ ID NO: 23774 - protein, 491 aa, Malus x domestica
MTSILMGYDIGVMSGASIYIEKDLKVTDTQIEIMIGVIEIYSLIGSAMAGKTSDWVGRRYTIVISGAIFFIGAILMGFSTNYTFLMCGRFVAGIGVGYALTIAPVYSAEVSPTSSRGFLTSFPEVFVNIGILLGYLSNYAFSFCPLDLGWRLMLGVGAIPSVGLAVGVLAMPESPRWLVMQGRLGEAKRVLDRTSDSKEESMLRLADIKEAAGIPEECNDDIVQVSGHSHGEGVWKELLVHPTPTVRHILIAAIGFHFFQQASGIDALVLYSPRVFAKAGITSTNQLLLCTVGVGLSKTVFTLVATFFLDRVGRRPLLLTSMAGMVGALVCLGTSLTIVDQHEGVRMTWAVILCLCCVLAYVGFFSSGIGPIAWVYSSEIFPLRLRAQGCGMGVAVNRLMSGILSMTFISLYKAITMGGTFFLYAAIGTVGWIFFFTMLPETQGRTLEDMEVLFGKFHKWRKANKLLEKKKRVAHGDIGTSDPDNRAHLLA

SEQ ID NO: 23775 - protein, 482 aa, Sinorhizobium meliloti
MVPTGGSSPVIRQLESAFTKIGVTGAHKQILALVLIGCLFDSFEQNTIGVAGPILKEHWGLTGTDIGFLNTITFGSAAIGRLLSGILGDRYGRRVMLTINLLLFTIGSAACAMAPNFTMLCFARAIVGFGVGGEISTAVTMLSEFCSPKFRGTAAGLVNVGAGGFGNFLAPAFGLLIFTLFPGENSWRWLFASLALPALLVVFYRRFVPETPRFLASKNKIGEANKVLSILASGSLKPRNLVVHEYLTTDHMTDEAPEKSDWRELFRAPFIGRTIPVAIAILMSYGAQLSVLTLMPVIFVSMGYTLSGSLLYSMIIQSGSVLGAIAASMFGYYLPRKKVLTVGAALACLAAVSIVTLGTNIYLVLLFGAIFQFFVLLLNTSIWIYAPELFPTRIRAFGVALILATGSAAGSFVPTISGMLFDSYGMVGVFGLAAGMYAVFAFCIQLGPETYGRSMEDLSQPAEADQPKVAQQQGPVAVELRT

SEQ ID NO: 23776 - protein, 248 aa, Lycopersicon esculentum
TGVISGALLYIRDDFKSVGKRTWLQETIVSMAVAGAIFGAAFGGWFNDKYGRRKSILLADILFFIGAIVMAVAPAPWVIIIGRVLVGLGVGMASMTSPLYISEASPARIRGALVSTNGLLITGGQFLSYLINLAFTRTKGTWRWMLGVASIPALVQFILMLSLPESPRWLYRADKKDEARAILEKIYPAHEVEDEMKALQTSIEVEKADKEFLGDGVFSKVKSAWSNTIVRRGLYAGITVQVAQQFVG

SEQ ID NO: 23777 - protein, 534 aa, Nicotiana tabacum
FGLQNRRILQGSGDLKRNTLLASRSLRMPERSSCFGVSMDSASMGIELGRARKTVQSVFGSSAKARSHRVRASGGDIEDATPLKVQGQSSGSVLPYVGVACLGAILFGYHLGVVNGALEYLAKDLGIVENTVIQGWIVSSVLAGATVGSFTGGALADKFGRTKTFVLDAIPLAVGAFLCTTAQSVQAMIIGRLLTGIGIGISSAIVPLYISEISPTEIRGTLGTVNQLFICIGILVALVAGLPLSGNPLWWRTMFGIALIPSVLLALGMAFSPESPRWLFQQGRISEAETSIKRLYGKERVAEVMGDLEASAQGSSEPDAGWLDLFSSRYWKVVSIGAALFLFQQFAGINAVVYYSTAVFRSAGISSDVAASALVGAANVFGTMVASSLMDKQGRKSLLLVSFTGMAASMMLLSLSFTWKVLTPYSGTLAVLGTVLYVLSFSLGAGPVPALLLPEIFASRIRAKAVALSLGMHWISNFFIGLYFLSIVTKFGISTVYLGFASVCLLAVMYIVGNVVETKGRSLEDIERELSPAI

SEQ ID NO: 23778 - protein, 470 aa, Solanum tuberosum
CRSHRVRAAGEDIEDAAPLKVQGQSSGSVLPYVGVACLGAILFGYHLGVVNGALEYLAKDLGIAENTVIQGWIVSTVLAGAFVGSFTGGVLADKFGRTKTFILDAIPLSVGAFLCTTAQSVQAMIIGRLLTGIGIGISSAIVPLYISEISPTEIRGTLGTVNQLFICIGILVALVVGLPLSGNPSWWRTMFGLALIPSVLLAIGMAFSPESPRWLYQQGRISEAETSIKRLYGKEKVAEVMGDLEASARGSSEPDAGWLDLFSSRYRKVVSIGAAMFLLQQLAGINAVVYYSTAVFRSAGITSDVAASALVGAANVFGTTVASSLMDKQGRKSLLLISYTGMAASMMLLSLSFTWKVLTPYSGTLAVLGTVLYVLSFSLGAGPVPALLLPEIFASRIRAKAVALSLGVHWIMNFFIGLYFLSIVTKFGISTVYMGFALSCLVAVVYITGNVVETKGRSLEEIERELSPAI

SEQ ID NO: 23779 - protein, 544 aa, Olea europaea
MQVSTHAVKGNLCLGLQNLRPLPSSRELRENNLGFAVSELRMTKRSSCFGIGLDSIAMGARGNWPKSVYGSLAKARSVRAQAYEGDVEDVAPAKIQVKSSGTVLPYVGVACLGAILFGYHLGVVNGALEYLAKDLGIAENAVLQGWVVSTLLAGATVGSFTGGSLADKFGRTKTFLLDAIPLAVGAFLCATAQNIETMIIGRLLAGIGIGISSAIVPLYISEISPTEIRGTLGSVNQLFICIGILAALVAGLPLAGNPLWWRTMFGVAIIPSILLALGMAFSPESPRWLYQQGKISEAEVSIRKLNGKERVAEVMSDLDAAAQGSSEPEAGWFDLFSSRYWKVVSVGAALFLFQQLAGINAVVYYSTSVFRSAGITSDVAASALVGAANVFGTTIASSLMDKQGRKSLLLTSFAGMAVSMLLLSLTFTWKTLAPYAGTLAVLGTVLYVLSFSLGAGPVPALLLPEIFASRIRAKAVALSLGMHWISNFVIGLYFLSVVTKFGISTVYLGFASVCLLAVMYIAGNVVETKGRSLEEIERALTAAP

SEQ ID NO: 23780 - protein, 588 aa, Oryza sativa
MEGGVHEFDGSTFRECFSLSWRNPYVLRLAFSAGIGGLLFGYDTGVISGALLYIRDDFPSVDKNTWLQEMIVSMAVAGAIIGAAIGGWANDRYGRRTSILVADALFFAGAAVMASATGPAQLVVGRVFVGLGVGTASMTSPLYISEASPARIRGALVSTNGLLITGGQFLSYLINLAFTKAPGTWRWMLGVAAIPAVVQFFLMLFLPESPRWLYRKGREEEAEAILRKIYSAEEVEREKEELKESVEAEARERSSSEKTSLVALLMTTATVRRGLVAGVGLQVFQQLVGINTVMYYSPTIVQLAGFASNQTALALSLVTAGLNAAGSLVSIYFIDRTGRRKLLVISLAGVILSLALLSAVFHEATSHSPPVGAAETAHFHGVTCPDYSSRSSSSFWDCTRCLKAAAASAGCGFCAAGGGDKLPGACLAADATARDACRGEGREWYTRGCPSRYGWLAMAGLALYIAAFSPGMGTVPWIVNSEVYPLRHRGVCGGAAATANWVSNLAVAQSFLSLTDAIGAAWTFLIFGGLSVAALAFVLVCVPETKGLPIEEVEKMLEGRELRLRFWAKRRHHHGGDGDGGGEKTGGV

SEQ ID NO: 23781 - protein, 578 aa, Oryza sativa
AMEGGATLADKAEFKECLRLTWSQPYILQLVFSAGIGGLLFGYDTGVISGALLYIRDDFTAVEKSTVLRETIVSMAVAGAIVGAGFGGWMNDKFGRKPSILIADSLFLAGALIMALAPTPFVIIIGRIFVGLGVGMASMTAPLYISEASPARIRGALVSTNGLLITGGQFMAYLINLAFTKVKGTWRWMLGIAGLPAFIQFILMCMLPESPRWLYRQDRKEEAEAILRKIYPAAEVEEEIDSMRRSIEHEKQLEGSIGEQSLVGKLTKALSSKVVRRGLMAGVIAQVAQQFVGINTVMYYSPTIVQLAGFASNNTAMALSLITSGLNAIGSIVSMFFVDRAGRRRLMIISLVGIVLWLAVLGGTFLGAAHHAPPVSDLETRVFANQTCPEYSPSARWNCMNCLKAQSTCGFCAHGGNKLLPGACLAAGEASRRTCHAGNREFYTEGCPNNFGWLALVALGAYIVSYSPGMGTVPWIVNSEIYPLRFRGVCGGIAAVANWVSNLIVTQTFLSLTKALGTSATFFLFCAVSFFALVVVFFTVPETKGLQFEEVEKMLGEKDYKPWKRYRPDVSSKGRDIG

SEQ ID NO: 23782 - protein, 515 aa, Oryza sativa
  unsure (1)..(515): unsure at all Xaa locations
XSXRSDLATVVLRVSAGVISGALLYIRDDFPSVDKNTWLQEMIVSMAVAGAIIGAAIGGWANDRYGRRTSILVADALFFAGAAVMASATGPAQLVVGRVFVGLGVGTASMTSPLYISEASPARIRGALVSTNGLLITGGQFLSYLINLAFTKAPGTWRWMLGVAAIPAVVQFFLMLFLPESPRWXEPGGAXLMTTATVRRGLVAGVGLQVFQQLVGINTVMYYSPTIVQLAGFASNQTALALSLVTAGLNAAGSLVSIYFIDRTGRRKLLVISLAGVILSLALLSAVFHEATSHSPPVGAAETAHFHGVTCPDYSSRSSSSFWDCTRCLKAAAASAGCGFCAAGGGDKLPGACLAADATARDACRGEGREWYTRGCPSRYGWLAMAGLALYIAAFSPGMGTVPWIVNSEVYPLRHRGVCGGAAATANWVSNLAVAQSFLSLTDAIGAAWTFLIFGGLSVAALAFVLVCVPETKGLPIEEVEKMLEGRELRLRFWAKRRHHHGGDGDGGGEKTGGV

SEQ ID NO: 23783 - protein, 545 aa, Oryza sativa
MEGGATLADKAEFKECLRLTWSQPYILQLVFSAGIGGLLFGYDTGVISGALLYIRDDFTAVEKSTVLRETIVSMAVAGAIVGAGFGGWMNDKFGRKPSILIADSLFLAGALIMALAPTPFVIIIGRIFVGLGVGMASMTAPLYISEASPARIRGALVSTNGLLITGGQFMAYLINLAFTKDRKEEAEAILRKIYPAAEVEEEIDSMRRSIEHEKQLEGSIGEQSLVGKLTKALSSKVVRRGLMAGVIAQVAQQFVGINTVMYYSPTIVQLAGFASNNTAMALSLITSGLNAIGSIVSMFFVDRAGRRRLMIISLVGIVLWLAVLGGTFLGAAHHAPPVSDLETRVFANQTCPEYSPSARWNCMNCLKAQSTCGFCAHGGNKLLPGACLAAGEASRRTCHAGNREFYTEGCPNNFGWLALVALGAYIVSYSPGMGTVPWIVNSEIYPLRFRGVCGGIAAVANWVSNLIVTQTFLSLTKALGTSATFFLFCAVSFFALVVVFFTVPETKGLQFEEVEKMLGEKDYKPWKRYRPDVSSKGRDIGLSVP

SEQ ID NO: 23784 - protein, 746 aa, Sorghum bicolor
MSMIHCKLNVQAEDLMGGATGAQGDVQWCNGGKLEEVAVLGCAHRIMAAEVSTVHQEVCKMYFWFAGAAIASRLIDCEAYLRTEFSGFIIVCKRAIVLDEMKSTVFSAVVVSIGYAMLGWDFAALLEANHHMKKEFELLNGPSIEGITLAASTFGAIVITIFSGALLDWLGRRAILVYSSLVLFSGGVLMLWSPNIYIVLLARLIVGSGSGLVFTCVPIYISETSPPNMRGLLGTMPQFMFFIGTIFSYCLIFWLTLMSSPNWRIMIGAIFAPSIVYFALLVYYLPESPRWLASDGKISEARVSLQRLRGKKHDVSGEIAVIVDGVDIISDSAVGTARAQSFSGTSASRTWPRSTFYWQLSDPLVDLLGSIHENMSEGGSRRNSFFPVFNSFSFPEHEHMNEHRDGNSDQQTREAYSAGEVNNGDGLRASLLSQAASVEVNDANTSFTSEGSSSYLRRHGTSVLAQEFMASIHDHDIEEEEEIHGFVLPHQSAPRDMESRGRHQVVRLSETADMKFKWRVLLQPGIRHALCYGMLIQALQQSTGISGLLRCAPEILEQVGVSLFSDIGLSPHSTSILISTLQALLILPCITAAMLLMDVCGRRVLVLATTPILILSLSVMSMSILFNMGPFDRAIVFHFALTVCFCSYVIGLGPIPNILCSEIFPTKARATCASFCSLSFWFGGLLSAYCLPVMMSTIGLGGACGIYALVCCAPLFLFYYRIPETKMLNLELIAELFKLSRQEYVQ

SEQ ID NO: 23785 - protein, 213 aa, Triticum aestivum
  unsure (1)..(213): unsure at all Xaa locations
XTREMQELKESVEAEARERGSSERVSLTALVKTPTVRRALVAGVGLQVFQQLVGINTVMYYSPSIVQLAGFASNQTALALSLVTSGLNALGSIVSIYFIDRTGRRKLLVISLVGVIASLALLSAVFHETTTHSPAVGSAETRHFDGSLTCPDYRTSSSGWDCTRCLKASSTECGFCASGAGSKLLPGACLLSNATVRDACHGEGRLWYTRGCX

SEQ ID NO: 23786 - protein, 150 aa, Triticum aestivum
  unsure (1)..(150): unsure at all Xaa locations
MEGGAHEFDGSAFRECFSLSWRNPYVLRLAFSAGIGGLLFGYDTGVISGALLYIRDDFRSVDKNTWLQVIKXEMIVSMAVAGAIIGAAVGGWANDRFGRRTSILVADLLFFAGAVVMASATGPVQLVVGRVLVGLGVGMASMTAXLYISX

SEQ ID NO: 23787 - protein, 181 aa, Triticum aestivum
  unsure (1)..(181): unsure at all Xaa locations
QKYTRGCPSRYGWLAMVGLALYIAFFSPGMGTVPWIVNSEIYPLRHRGVCGGVAATANWVSNLVVAQSFLTLTEAIGPAWTFLIFGCLSVAALAFVLVCVPETKGLPIEEVEKMLEKRDLRLKFWAPRGRASKNDGLXVSSLPSSFSARTRQSVAIQVIGISICRLSILLYMLQITFVGFQ

SEQ ID NO: 23788 - protein, 408 aa, Zea mays
  unsure (1)..(408): unsure at all Xaa locations
MEGGAHEFDGSTFKECFSLSWRNPYVLRLAFSAGIGGLLFGYDTGVISGALLYIRDDFVSVDRNTWLQEMIVSMAVAGAIIGAAIGGWTTDRFGRRASILVADSLFFAGAAVMASATRPAQLVVGRVFVGLGVGMASMTSPLYISEASPARIRGALVSTNGFLITGGQFLAYLINLAFTKAPGTWRWMLGVAALPAVVQFGLMLALPESPRWLYRQGRAEEAEAILRRIYSAEEVEREIEELKESVAAERGSSEKLSLVALVRTATVRRGLVAGVGLQVFQQLVGINTVMYYSPTIVQLAGFASNQTALALSLVTSGLNALGSVVSIYFIDRTGRRKLLVISLVGVILSLGVLTAVFHETASHSPAVSATETARFDASLTCPSYRPSSPASAWDCTRCLKAAADKXAX

SEQ ID NO: 23789 - protein, 421 aa, Acinetobacter calcoaceticus
MPKEANMASQDYATQRSSLDAQALINDAPLSRYQWLIAIVCFLIVFVDGIDTAAMGFIAPALAQDWGVDRSQLGPVMSAALGGMIIGALVSGPTADRFGRKIVLSMSMLVFGGFTLACAYSTNLDSLVIFRFLTGIGLGAAMPNATTLFSEYCPARIRSLLVTCMFCGYNLGMAIGGFISSWLIPAFGWHSLFLLGGWAPLILMLLVIFFLPESYRFLIVKGKNTKKVRQILSRIAPQKVQGVTEFHVPEEKVEAGTKKGVFGMLFSAKYVKGTVLLWVTYFMGLVMIYLLTSWLPTLMRETGASLERAAFLGGLFQFGGVLSALFIGWAMDRFNPNRIIAGFYLAAGIFAVIVGQSLSNPTLLALFHFMCRYCRQWCSIFNASIECAFLSNAMSCNRCGMDVWNWPFWSPYLVHGLVQFY

SEQ ID NO: 23790 - protein, 457 aa, Acinetobacter calcoaceticus
MPKEANMASQDYATQRSSLDAQALINDAPLSRYQWLIAIVCFLIVFVDGIDTAAMGFIAPALAQDWGVDRSQLGPVMSAALGGMIIGALVSGPTADRFGRKIVLSMSMLVFGGFTLACAYSTNLDSLVIFRFLTGIGLGAAMPNATTLFSEYCPARIRSLLVTCMFCGYNLGMAIGGFISSWLIPAFGWHSLFLLGGWAPLILMLLVIFFLPESYRFLIVKGKNTKKVRQILSRIAPQKVQGVTEFHVPEEKVEAGTKKGVFGMLFSAKYVKGTVLLWVTYFMGLVMIYLLTSWLPTLMRETGASLERAAFLGGLFQFGGVLSALFIGWAMDRFNPNRIIAGFYLAAGIFAVIVGQSLSNPTLLALFILCAGIAVNGAQSSMPVLSARFYPTQCRATGVAWMSGIGRFGAVFGAWIGAVLLGNNWSFTMILSMLIIPARAAAIAIFVKSLVAHTDAT

SEQ ID NO: 23791 - protein, 312 aa, Schizosaccharomyces pombe
MSISSKDFQNVTSAGFADDTFAADTFAADKKSPFESSVFENKTQVLPVDSVSRLSNGARSRSNSNISLSEPHALNDTVEDQPVSKWVWVLAFAAGIGGLLFGYDTGVISGALVVIGTSLGGHELTNGGKEFITSATSLGALLGGIIAGALADFFGRKPVIAIASIIIIVGSIVQVTAHHLWHMIVGRFVIGWGVGIASLIIPLYLSEIAPSKIRGRLVIIYVLLITAGQVIAYGIDTAFEHVHNGWRWMVGLAMVPAAFQLFILIWLPESPRLLVKKERSQEAYNTLARIYPTAHPYEIKTKLYLIQEGVRD

SEQ ID NO: 23792 - protein, 612 aa, Saccharomyces cerevisiae
MAEMKNSTAASSRWTKSRLSHFFPSYTNSSGMGAASTDQSSTQGEELHHRKHCEEDNDGQKPKKSPVSTSTMQIKSRQDEDEDDGRIVIKPVNDEDDTSVIITFNQSISPFIITLTFVASISGFMFGYDTGYISSALISINRDLDNKVLTYGEKELITAATSLGALITSVGAGTAADVFGRRPCLMFSNLMFLIGAILQITAHKFWQMAAGRLIMGFGVGIGSLISPLFISEIAPKMIRGRLTVINSLWLTGGQLIAYGCGAGLNHVKNGWRILVGLSLIPTVLQFSFFCFLPDTPRYYVMKGDLKRAKMVLKRSYVNTEDEIIDQKVEELSSLNQSIPGKNPITKFWNMVKELHTVPSNFRALIIGCGLQAIQQFTGWNSLMYFSGTIFETVGFKNSSAVSIIVSGTNFVFTLIAFFCIDKIGRRYILLIGLPGMTVALVICAIAFHFLGIKFNGADAVVASDGFSSWGIVIIVFIIVYAAFYALGIGTVPWQQSELFPQNVRGVGTSYATATNWAGSLVIASTFLTMLQNITPTGTFSFFAGVACLSTIFCYFCYPELSGLELEEVQTILKDGFNIKASKALAKKRKQQVAEGAAHHKLKFEPTQEIVES

SEQ ID NO: 23793 - protein, 584 aa, Saccharomyces cerevisiae
MGIHIPYLTSKTSQSNVGDAVGNADSVEFNSEHDSPSKRGKIHIESHEIQRAPASDDEDRIQIKPVNDEDDTSVMITFNQSLSPFIITLTFVASISGFMFGYDTGYISSALISIGTDLDHKVLTYGEKEIVTAATSLGALITSIFAGTAADIFGRKRCLMGSNLMFVIGAILQVSAHTFWQMAVGRLIMGFGVGIGSLIAPLFISEIAPKMIRGRLTVINSLWLTGGQLVAYGCGAGLNYVNNGWRILVGLSLIPTAVQFTCLCFLPDTPRYYVMKGDLARATEVLKRSYTDTSEEIIERKVEELVTLNQSIPGKNVPEKVWNTIKELHTVPSNLRALIIGCGLQAIQQFTGWNSLMYFSGTIFETVGFKNSSAVSIIVSGTNFIFTLVAFFSIDKIGRRTILLIGLPGMTMALVVCSIAFHFLGIKFDGAVAVVVSSGFSSWGIVIIVFIIVFAAFYALGIGTVPWQQSELFPQNVRGIGTSYATATNWAGSLVIASTFLTMLQNITPAGTFAFFAGLSCLSTIFCYFCYPELSGLELEEVQTILKDGFNIKASKALAKKRKQQVARVHELKYEPTQEIIEDI

SEQ ID NO: 23794 - protein, 584 aa, Saccharomyces cerevisiae
MGIHIPYLTSKTSQSNVGDAVGNADSVEFNSEHDSPSKRGKITLESHEIQRAPASDDEDRIQIKPVNDEDDTSVMITFNQSLSPFIITLTFVASISGFMFGYDTGYISSALISIGTDLDHKVLTYGEKEIVTAATSLGALITSIFAGTAADIFGRKRCLMGSNLMFVIGAILQVSAHTFWQMAVGRLIMGFGVGIGSLIAPLFISEIAPKMIRGRLTVINSLWLTGGQLVAYGCGAGLNYVNNGWRILVGLSLIPTAVQFTCLCFLPDTPRYYVMKGDLARATEVLKRSYTDTSEEIIERKVEELVTLNQSIPGKNVPEKVWNTIKELHTVPSNLRALIIGCGLQAIQQFTGWNSLMYFSGTIFETVGFKNSSAVSIIVSGTNFIFTLVAFFSIDKIGRRTILLIGLPGMTMALVVCSIAFHFLGIKFDGAVAVVVSSGFSSWGIVIIVFIIVFAAFYALGIGTVPWQQSELFPQNVRGIGTSYATATNWAGSLVIASTFLTMLQNITPAGTFAFFAGLSCLSTIFCYFCYPELSGLELEEVQTILKDGFNIKASKALAKKRKQQVARVHELKYEPTQEIIEDI

SEQ ID NO: 23795 - protein, 450 aa, Desulfitobacterium hafniense
MTMTGSDQSAPTYFDDMKLTSSHKRMLWLAAICYMFDQMDVGTFAYAAPVLVKTWGLTMEQIAQVNSYGFVGMFLGAIFGGWIADKIGRKKTIILCVAIFSLGSLGNALAFNFHTLAITRFFTGLGVIGMLVVAMVYIAEMMPSEHRGRYQALTMACGTIAIPVGAAFARWVVPLSTESWRYIFVLGGTSILLLPFCFIVFKESPRWLVSKGRITEAEKVIREITGREVDLSSEVPEKIKKSSSLSTLKLILSKEYLKRTIILVIITDGVVLGAQMLGGFYPAILQEYAGFQLTLVLSIMALSWWGIPFGDLSASLVSDKGGRKGPLALFSIINGMTFVVCGFFPTPAVIIAAVFLSRVFGGGSVSILYTYLAESYPTHIRSTAVGLIMGQVRILSAVIVLIVPPILATYGWLGVHLVNAGIIIVTAIVALIFGQKTSKRTLEEINKAPG

SEQ ID NO: 23796 - protein, 450 aa, Desulfitobacterium hafniense
MKYPISQRFEVEDRKMRKINVNKVIDEAKFNRYFLIIFVLLLLALIFDGYDMGIYGVTLPSVMKELNLNATQTGLLASAGMFGMMFGALLFGMLSDVIGRKKTIIIGIFVYSVFNGIVAFIHSASIFAVVRFIAGMGMGALTPVVISLLSEYTPRSRRTLLLTMVMVGIPLGQLVASLAGVAFLESIGWRVLYLATLIALIMIAFVVWNVPESMKFYVPRGETKTIKKVLAKANPDFEQTEEDVYELSIVNQQKASLGSLFKSGYAKNTIYIWIAFFCNLYLFFGISTWLPKLMTMLGYPLKSSVMFLAIFLLGGVLTTPFVGMLGDKYGYKKVMPVLYAMSAVLVSLLSFQMSTFIFYTLLFLAGCAVTLVQSMTLAAAPDFYPIAFRGTAMGWGSAVSRLGSAVAPTVVGVLLTANLPVRGVFLTFIIPAVIACIAILLTKKDPDLVG

SEQ ID NO: 23797 - protein, 451 aa, Desulfitobacterium hafniense
MSISTQFSVPQRMERLPLTSYQKKIFYIIATAWFFDSMDLGMLTFVLGSIKTDLGLTTVQAGLLSSFSFLGMFFGAASAGMAADKFGRKIVFQTSMILWGAASIACAFTQNVEQLALARFFLGLGMGMEFPIGQSLISEFIPAKNRGRYIALLEGFWPIGFIAAGILSYFLLPIGGWRLVFLCEGIPAIFVLIIRRMVPESPRWLADTNQDEKADVVMTAFEKNVEKAYGKELPPPIKDDNLVIGKHEKKFSFLQLWAPGYKKRTIMVWLLWFFALLGYYGLTTWLSAFLQEAGYSVTKSVYYTIMISLAGIPGFFSAAYFIEKNGRKPTLIVVLIGCAVFAYLYGTASSLQTLIGFGLGMQFFLFAMWSSLYAYTPELYPTRARATGTGFASSVGRFGSLLGPYIVAVVLPTLGNSGVFALGAACFIAAALSVAILGEETKGRVLEEISA

SEQ ID NO: 23798 - protein, 537 aa, Neurospora crassa
MTDNPEEPLIANTQSTERDQDDGSHDVEHAHDSRGGKQHISPPGLFIWLLTFSAGISGLLFGYDTGVISATLVSIGTSLSHRPLTSLDKSVITSCTSLFALLALPFASALADDRGRKRVVLFADTLFIIGALCQAASRTVEVMVIGRSVVGIAIGAASFVTPLYIAELAPATHRGRLVTMNIVFITLGQVVAYVVGWIFGTYGSPETTGWRWMVGLGAVPAVCQVVILLWMPESPRWLVKDGRSQEARAVIAKIAAGDDAQDPSTRREVDAVLKSIEIEVREEATAMRLGGAGAGYANGNAVNAWMEAMRELIRVRRNRRALAIACLLQGLQQLCGFNSLMYFSATIFTMVGFSEPTLTSLVVAVTNFAFTLVALVLIDRVGRRRILLWSLPFMIAGLVLAGYGFSFIELPNSETSSPSTTGGQGGAVIILASIMIYVAGYAIGLGNVPWMQSELFSLSVRSVGSGVATATNWSANFVIGLTFLPLMEALSPSWTFVLYAVICAVGYGLIWTVYPETAGLSLEDAATLLEADDWGVR

SEQ ID NO: 23799 - protein, 487 aa, Neurospora crassa
MTDNPEEPLIANTQSTERDQDDGSHDVEHAHDSRGGKQHISPPGLFIWLLTFSAGISGLLFGYDTGVISATLVSIGTSLSHRPLTSLDKSVITSCTSLFALLALPFASALADDRGRKRVVLFADTLFIIGALCQAASRTVEVMVIGRSVVGIAIGAASFVTPLYIAELAPATHRGRLVTMNIVFITLGQVVAYVVGWIFGTYGSPETTGWRWMVGLGAVPAVCQVVILLWMPESPRWLVKDGRSQEARAVIAKIAAGDDAQDPSTRREVDAVLKSIEIEGLQQLCGFNSLMYFSATIFTMVGFSEPTLTSLVVAVTNFAFTLVALVLIDRVGRRRILLWSLPFMIAGLVLAGYGFSFIELPNSETSSPSTTGGQGGAVIILASIMIYVAGYAIGLGNVPWMQSELFSLSVRSVGSGVATATNWSANFVIGLTFLPLMEALSPSWTFVLYAVICAVGYGLIWTVYPETAGLSLEDAATLLEADDWGVR

SEQ ID NO: 23800 - protein, 600 aa, Drosophila melanogaster
MSNLSEDSYDYVFGGRRKTPPTTTSTQLKLTSPPVRLRPEDAYRGANINNGRFYRHSFSYAPKRQRHSSRDDRDRESRLRCHGEDEATLRQLLLDLQKQVSVMSMNLSAKLDELQRGDRHLETTVALCEIRTQLQELTKSVESCQSEVSEVKRDMVAIKHELDTVQQVKEEIEELREYVDRLEEHTHRRKLRLLEQGLTFFLTYSIFSAVLGMLQFGYNTGVINAPEKNIENFMKDVYKDRYGEDISEEFIQQLYSVAVSIFAIGGMLGGFSGGWMANRFGRKGGLLLNNVLGIAGACLMGFTKVSHSYEMLFLGRFIIGVNCGLNTSLVPMYISEIAPLNLRGGLGTVNQLAVTVGLLLSQVLGIEQILGTNEGWPILLGLAICPAILQLILLPVCPESPRYLLITKQWEEEARKALRRLRASGSVEEDIEEMRAEERAQQSESHISTMELICSPTLRPPLIIGIVMQLSQQFSGINAVFYYSTSLFMSSGLTEESAKFATIGIGAIMVVMTLVSIPLMDRTGRRTLHLYGLGGMFIFSIFITISFLIKASIVVSRILESCSCSCRVMPANVNAKMPASLGLHLFVPRPFSDLHMTLKS

SEQ ID NO: 23801 - protein, 647 aa, Drosophila melanogaster
MATIGDLSMISPPTSSISNDQDPFGQLPPLPPPLRSTQVLQPLSVFPVSNLSEDSYDYVFGGRRKTPPTTTSTQLKLTSPPVRLRPEDAYRGANINNGRFYRHSFSYAPKRQRHSSRDDRDRESRLRCHGEDEATLRQLLLDLQKQVSVMSMNLSAKLDELQRGDRHLETTVALCEIRTQLQELTKSVESCQSEVSEVKRDMVAIKHELDTVQQVKEEIEELREYVDRLEEHTHRRKLRLLEQGLTFFLTYSIFSAVLGMLQFGYNTGVINAPEKNIENFMKDVYKDRYGEDISEEFIQQLYSVAVSIFAIGGMLGGFSGGWMANRFGRKGGLLLNNVLGIAGACLMGFTKVSHSYEMLFLGRFIIGVNCGLNTSLVPMYISEIAPLNLRGGLGTVNQLAVTVGLLLSQVLGIEQILGTNEGWPILLGLAICPAILQLILLPVCPESPRYLLITKQWEEEARKALRRLRASGSVEEDIEEMRAEERAQQSESHISTMELICSPTLRPPLIIGIVMQLSQQFSGINAVFYYSTSLFMSSGLTEESAKFATIGIGAIMVVMTLVSIPLMDRTGRRTLHLYGLGGMFIFSIFITISFLIKASIVVSRILESCSCSCRVMPANVNAKMPASLGLHLFVPRPFSDLHMTLKS

SEQ ID NO: 23802 - protein, 617 aa, Homo sapiens
MVPVENTEGPSLLNQKGTAVETEGSGSRHPPWARGCGMFTFLSSVTAAVSGLLVGYELGIISGALLQIKTLLALSCHEQEMVVSSLVIGALLASLTGGVLIDRYGRRTAIILSSCLLGLGSLVLILSLSYTVLIVGRIAIGVSISLSSIATCVYIAEIAPQHRRGLLVSLNELMIVIGILSAYISNYAFANVFHGWKYMFGLVIPLGVLQAIAMYFLPPSPRFLVMKGQEGAASKVLGRLRALSDTTEELTVIKSSLKDEYQYSFWDLFRSKDNMRTRIMIGLTLVFFVQITGQPNILFYASTVLKSVGFQSNEAASLASTGVGVVKVISTIPATLLVDHVGSKTFLCIGSSVMAASLVTMGIVNLNIHMNFTHICRSHNSINQSLDESVIYGPGNLSTNNNTLRDHFKGISSHSRSSLMPLRNDVDKRGETTSASLLNAGLSHTEYQIVTDPGDVPAFLKWLSLASLLVYVAAFSIGLGPMPWLVLSEIFPGGIRGRAMALTSSMNWGINLLISLTFLTVTDLIGLPWVCFIYTIMSLASLLFVVMFIPETKGCSLEQISMELAKVNYVKNNICFMSHHQEELVPKQPQKRKPQEQLLECNKLCGRGQSRQLSPET

SEQ ID NO: 23803 - protein, 338 aa, Homo sapiens
MGERRRKQPEPDAASAAGECSLLAAAESSTSLQSAGAGGGGVGDLERAARRQFQQDETPAFVYVVAVFSALGGFLFGYDTGVVSGAMLLLKRQLSLDALWQELLVSSTVGAAAVSALAGGALNGVFGRRAAILLASALFTAGSAVLAAANNKETLLAGRLVVGLGIGIASMTVPVYIAEVSPPNLRGRLVTINTLFITGGQFFASVVDGAFSYLQKDGWRYMLGLAAVPAVIQFFGFLFLPESPRWLIQKGQTQKARRILSQMRGNQTIDEEYDSIKNNIEEEEKEVGSAGPVICRMLSYPPTRRALIVGCGLQMFQQLSGINTIMYVFLSGFLLKRL

SEQ ID NO: 23804 - protein, 541 aa, Homo sapiens
MGHSPPVLPLCASVSLLGGLTFGYELAVISGALLPLQLDFGLSCLEQEFLVGSLLLGALLASLVGGFLIDCYGRKQAILGSNLVLLAGSLTLGLAGSLAWLVLGRAVVGFAISLSSMACCIYVSELVGPRQRGVLVSLYEAGITVGILLSYALNYALAGTPWGWRHMFGWATAPAVLQSLSLLFLPAGTDETATHKDLIPLQGGEAPKLGPGRPRYSFLDLFRARDNMRGRTTVGLGLVLFQQLTGQPNVLCYASTIFSSVGFHGGSSAVLASVGLGAVKVAATLTAMGLVDRAGRRALLLAGCALMALSVSGIGLVSFAVPMDSGPSCLAVPNATGQTGLPGDSGLLQDSSLPPIPRTNEDQREPILSTAKKTKPHPRSGDPSAPPRLALSSALPGPPLPARGHALLRWTALLCLMVFVSAFSFGFGPVTWLVLSEIYPVEIRGRAFAFCNSFNWAANLFISLSFLDLIGTIGLSWTFLLYGLTAVLGLGFIYLFVPETKGQSLAEIDQQFQKRRFTLSFGHRQNSTGIPYSRIEISAAS

SEQ ID NO: 23805 - protein, 504 aa, Streptomyces coelicolor A3(2)
MTAETSSSGSVPASTGTVTTAVPARLDRLPWSRWHWMIVIGLGTVWILDGLEVTIVGNVAGRIAEDGSGLDISSAQITGLAAALYVAGACSGALFFGWLTDRHGRKKLFMLTLVVYLAATALTAVSFESWWFFLFRFLTGFGIGGEYAAINSAIDELIPSHYRGRVDLIINGSYWLGAIGGALLSIVMLDTDIFAKDVGWRLSFALGVVLGLVVLLVRRHVPESPRWQFIHGQGEKADTLVSSVEREIEREKGAKLPPPAGEITIHQRKSIGFGLIAKTVFRRYPRRAVLGLSLFIGQAFLYNAITFGFGTILITFFDVPTGSTGYYFAVIAAGNFCGPLLLGHLFDTVGRRIMISSTYLLSGVLLFGTAWLFDRGSLTATTMTACWCVVLFFASAGASSAYLTVSEIFPMETRAMAIAFFYALGTAAGGISGPLLFADLTESGVVGDTVLAFQIGAGLMCAAGLVAAFLAVKAERRSLEDIAEPLSTAVPETPGTAGPGAKTA

SEQ ID NO: 23806 - protein, 473 aa, Bacillus megaterium
MKQNRNSLYIFSITLVAAIGGLLFGYDTAVISGAEESLKVYLIDSLGLGSLAHGVTVSSALIGCIIGGLVSGYFATKLGRKQSLILAAILFIVSALGASYPEFLFFTKGEPTLSLLLAFNFYRIIGGIGVGLASAICPIYIGEIAPADIRGRLVSFNQFMIIFGMLVVYFVNWGIANGETLEWINDVGWRYMFASGAIPALLFAALLFLVPETPRYLAIQNQDQKALAILTKINGSSEAKAILEDIKQTISTNVSSEKLLAYGKLVIVVGILLSVFQQFVGINVALYYAPRIFESMGAAKGSSMLQTIIMGLVNVIFTVIAILTVDRLGRKPLLITGSIGMAIGMFGVASMAFSNIIGIGTLVFIIIYTASFMMSWGPICWVLISEIFPNKIRGRAVAIAVAAQWAANYFISSTYPVMMEYSGGLTYGFYGLMSVLSALFVWKFVPETKGRTLEQMENMWRKKQGASKSKKAI

SEQ ID NO: 23807 - protein, 455 aa, Clostridium acetobutylicum
MNKKISPALIYFFGAFGGFMFGYDIGIINGALPGINATWHVSSWLEGFITSGLFVGAMIGASLMASLADRFGRRRMIMWSAIVFALGALGSAVSTSTNLLIGARVILGVAVGGASALVPMYMGEISPAETRGKLSGLNQLMITVGMLFSYGVNFAFAGAFEGWRWMLGGAMVPAMVLLIGTFILPESPRFLARIGKTELAKQVLQTLRSKEEAETEYQEIINSKHTETGSFGDLFAKQALPAVIAGCGLTLLQQIQGANTIFYYSSQILSNVFGSANGGTISTVGIGVVLVLATIVTLLVVDKFKRRTLFMTGSIGMGASLLLVGLIYPYSEAKHAWATWLVFFFICLYVVFYAYSWAATTWIVVGELFPSNVRGLATGIASAVNWFGNILVALFFPVLLETVGLSVIFFGFAAICIIGFLFAKYVLYETKGKSLEEIETYLYNRSIGKVRGLNE

SEQ ID NO: 23808 - protein, 418 aa, Escherichia coli O157:H7 EDL933
MYQSRFTCTRNEVHLMSTRTPSSSSSRLMLTIGLCFLVALMEGLDLQAAGIAAGGIAQAFALDKMQMGWIFSAGILGLLPGALVGGMLADRYGRKRILIGSVALFGLFSLATAIAWDFPSLVFARLMTGVGLGAALPNLIALTSEAAGPRFRGTAVSLMYCGVPIGAALAATLGFAGANLAWQTVFWVGGVVPLILVPLLMRWLPESAVFAGEKQAAPPLRALFAPETATATLLLWLCYFFTLLVVYMLINWLPLLLVEQGFQPSQAAGVMFALQMGAASGTLMLGALMDKLRPVTMSLLIYSGMLASLLALGTVSSFNGMLLAGFVAGLFATGGQSVLYALAPLFYSSQIRATGVGTAVAVGRLGAMSGPLLAGKMLALGTGTVGVMAASAPGILVAGLAVFILMSRRLRMQPCADA

SEQ ID NO: 23809 - protein, 413 aa, Pseudomonas putida KT2440
MHHSCASSGKAVLTIGLCFLVALLEGLDLQATGIAAPHMAKAFNLTPAMLGWVFSAGLLGLLPGALIGGWLADRFGRKAILIVAVLLFGGFSLGTAHAQTYDSLLIARLMTGLGLGAALPILIALASEAAPERLRSTAVSLTYCGVPLGGAVASLIGMAGVGDGWRTVFYVGGIAPIVIAFVLMIWLKESQAFRAQGVAKAGSEGVLAQLFGPQQASRTLLLWVACFFTLTVLYMLLNWLPSLLIGQGFSRPQAGAVQILFNLGGAAGSFLTGRMMDRGFAGRAVLIAYAGMLASLAGLGLSSSFGLMLLAGFTAGYCAIGGQLVLYALAPTLYSTQVRATGLGASVAVGRLGSMAGPLAAGQILAAGAGAGGLLMAAAPGLVLAALAARALLKHRTRTQRPEPGEAAAQDPA

SEQ ID NO: 23810 - protein, 433 aa, Oceanobacillus iheyensis HTE831
MSKQRFAAKNVTGWKATIAIAMANYIEAGSIIAAASSLTLWQAYLGFDSLGVGLLSALSANALGAAIGALIGGPLTDKYGRKIIFSYDLLVYMIGVALIAASVNFPMLLIGTIITGIAVGAGVPVSWTYIAEESPKKKRAAHVGAAQLAWSIGPMITFALAVLVAPLELLGSRLIFIHLFIVAGLALYIRRGLPESKIWEEQKARDDADKAKGIVKKGTLKELFTLKPNREALFLLLGIYLFWNLTAGAMGYFMPYIYENVGGLSNMEANLLQSFLWMFTVLTTFFIFMKLGDKISRKTLFTIGALMGVAAWIILTFMPMTWPTLIAFVILWGSAAGIGAQAFYALWTSELFPTRYRATAQGFMYFIVRTGIALWSVVLPVIMDTLGFVVAGIVMIIFLVIHLVIGVVLAPDTRGKTLTEIEEERYGKERIAN

SEQ ID NO: 23811 - protein, 501 aa, Streptomyces avermitilis MA-4680
MSASAPQAHGPAATGTVTTDVPARLDRLPWSRWHWMIVIGLGTVWILDGLEVTTVGNIAGRLSEDGSGLSITSAQVTGVAAALYVAGACAGALFFGWLTDRFGRKKLFMVTLVVYLSATALTALSFNSWWFFTFRFLTGFGIGGEYAAINSAIDELIPAKYRGRVDLIINGSYWLGAIGGALLSIVMLDTSIFPKDLGWRLTFALGVVLGLVILLVRRHVPESPRWQFIHGRGEDAEALVSSVEREIEQEKGEPLPRAESEITIEQRKSIGFGLIAKTVFGRYPKRAVLGLALFIGQAFLYNAITFGFGAILTTFYDVPTGGTGYYFAVIAAGNFIGPLLLGKLFDTVGRRIMIASTYLLSGLLLFGTAWLFDRGSLSAMTLTACWCAVLFFASAGASSAYLTVSEVFPMETRAMAIAFFYALGTAAGGISGPLVFADLTESGVVGDTVLAFQIGAGLMCAAGLVAAFLAVNAERRSLEDIAEPLSVAQTTAPAPASASGT

SEQ ID NO: 23812 - protein, 555 aa, Mesembryanthemum crystallinum
MQASSCLVKGNLGFEVQNRRRGVLAVAGLGGFKNSSPILSSNLRFVNGVINKKSSSCKLTTSGSVLMGAGLARMGLDHVFQSTAKYRSVKAQAASGDYEDPAPVKFQGKSSASVLPYVGVACLGAILFGYHLGVVNGALEYLSPDLGIAGNTVLQGWVVSILLAGATVGSFTGGSLADKFGRTRTFQLDAIPLAIGAYLCATAQSVQTMMIGRLLCGIGIGISSALVPLYISEISPTEIRGALGSVNQLFICIGILAALVAGLPLAGNPLWWRTMFGIAAIPSVLLALGMAMCPESPRWLFQQGKVAEAEKASAALYGKERVPEVMNDLKASVQGSSEPEAGWFDLFSSRYRKVVSVGAALFLFQQMAGINAVVYYSTSVFRSAGIESDVAASALVGAANVFGTAIASSLMDRQGRKSLLITSFSGMAASMLLLSLSFTWPVLAPYSGTLAVLGTVLYVLSFSLGAGPVPALLLPEIFASRIRAKAVALSLGMHWASNFVIGLYFLSVVTKFGISRVYLGFASVCMLAVLYIAGNVVETKGRSLEEIERALSPAV

SEQ ID NO: 23813 - protein, 546 aa, Arabidopsis thaliana
MQSSTYAVKGNAAFAFQRRTFSSDRSTTSTGIRFAGYKSLATTGPLYCSGSEAMGATLARADNGIQSVMSFSSVKARSVRAQASSDGDEEEAIPLRSEGKSSGTVLPFVGVACLGAILFGYHLGVVNGALEYLAKDLGIAENTVLQGWIVSSLLAGATVGSFTGGALADKFGRTRTFQLDAIPLAIGAFLCATAQSVQTMIVGRLLAGIGIGISSAIVPLYISEISPTEIRGALGSVNQLFICIGILAALIAGLPLAANPLWWRTMFGVAVIPSVLLAIGMAFSPESPRWLVQQGKVSEAEKAIKTLYGKERVVELVRDLSASGQGSSEPEAGWFDLFSSRYWKVVSVGAALFLFQQLAGINAVVYYSTSVFRSAGIQSDVAASALVGASNVFGTAVASSLMDKMGRKSLLLTSFGGMALSMLLLSLSFTWKALAAYSGTLAVVGTVLYVLSFSLGAGPVPALLLPEIFASRIRAKAVALSLGMHWISNFVIGLYFLSVVTKFGISSVYLGFAGVCVLAVLYIAGNVVETKGRSLEEIELALTSGA

SEQ ID NO: 23814 - protein, 515 aa, Arabidopsis thaliana
FAGYKSLATTGPLYCSGSEAMGATLARADNGIQSVMSFSSVKARSVRAQASSGDEEEAIPLRSEGKSSGTVLPFVGVACLGAILFGYHLGVVNGALEYLAKDLGIAENTVLQGWIVSSLLAGATVGSFTGGALADKFGRTRTFQLDAIPLAIGAFLCATAQSVQTMIVGRLLAGIGIGISSAIVPLYISEISPTEIRGALGSVNQLFICIGILAALIAGLPLAANPLWWRTMFGVAVIPSVLLAIGMAFSPESPRWLVQQGKVSEAEKAIKTLYGKERVVELVRDLSASGQGSSEPEAGWFDLFSSRYWKVVSVGAALFLFQQLAGINAVVYYSTSVFRSAGIQSDVAASALVGASNVAGTAVASSLMDKMGRKSLLLTSFGGMVHSMLLLSLSFTWKALAAYSGTLAVVGTVLYVLSFSLGAGPVPALLLPEIFASRIRAKAVALSLGMHWISNFVIGLYFLSVVTKFGISSVYLGFAGVCVLAVLYIAGNVVETKGRSLEEIELALFVSSFSL

SEQ ID NO: 23815 - protein, 560 aa, Arabidopsis thaliana
MQSSTYAVKGNAAFAFQRRTFSSDRSTTSTGIRFAGYKSLATTGPLYCSGSEAMGATLARADNGIQSVMSFSSVKARSVRAQASSDGDEEEAIPLRSEGKSSGTVLPFVGVACLGAILFGYHLGVVNGALEYLAKDLGIAENTVLQGKYMMIHFFTPPVNGWIVSSLLAGATVGSFTGGALADKFGRTRTFQLDAIPLAIGAFLCATAQSVQTMIVGRLLAGIGIGISSAIVPLYISEISPTEIRGALGSVNQLFICIGILAALIAGLPLAANPLWWRTMFGVAVIPSVLLAIGMAFSPESPRWLVQQGKVSEAEKAIKTLYGKERVVELVRDLSASGQGSSEPEAGWFDLFSSRYWKVVSVGAALFLFQQLAGINAVVYYSTSVFRSAGIQSDVAASALVGASNVFGTAVASSLMDKMGRKSLLLTSFGGMALSMLLLSLSFTWKALAAYSGTLAVVGTVLYVLSFSLGAGPVPALLLPEIFASRIRAKAVALSLGMHWISNFVIGLYFLSVVTKFGISSVYLGFAGVCVLAVLYIAGNVVETKGRSLEEIELALTSGA

SEQ ID NO: 23816 - protein, 547 aa, Glycine max
MQASTFGVEGATFGVQERRGLVGFGEFRNGSVLRPRRVCMTKNNTDLCGLRLGSVTMETELTSARIGFGGIFGPSVKPRSVRVMASDGNIEDVVPATPQGKSSGNVLPYVGVACLGAILFGYHLGVVNGALEYLAKDLGITENTVLQGWIVSTLLAGATVGSFTGGSLADQFGRTRTFQLASIPLAIGAFLGATAQSVQPMIIGRLLAGIGIGVTSAIVPLYISEISPTEIRGALGSVNQLFICIGILLALVAGLPLAGNPIWWRSMFGIAIVPSVLLALGMAISPESPRWLVQQGKISEAEKAIKTLYGQERVAAVMNDLTTASQGSSEPEAGWLDLFSSRYWKVVSVGAALFLFQQLAGINAVVYYSTSVCRSAGIASDVAASALVGASNVFGTCIASSLMDKQGRKSLLITSFSGMAASMLLLSLSFTWKVLAPYSGTLAVLGTVLYVLSFSLGAGPVPALLLPEIFASRIRAKAVSLSLGTHWISNFVIGLYFLSVVNKFGISTVYLGFSIVCLLAVVYIARNVVETKGRSLEEIERALSAST

SEQ ID NO: 23817 - protein, 380 aa, Glycine max
  unsure (1)..(380): unsure at all Xaa locations
MNIMSSSRSRSSWCGLWPGSFNMETELTIRGKSFGGIFGSSAKPRSLRVQPSDEDVEDLLPSNISGKPSGTVLPYVGVACLGAMLFGYHLGVVNGSLEYLAKDLGITQNTVIQGWIVSALLAGATVGSFTGGALADKFGRTRTFQLDAIPLAIGGFLCATAQSVQTMIIGRLLAGIGIGVTSAIVPLYISEISPTEIRGALGSVNQLFICIGILAALLAGLPLVGNPIWWRTMFGITVVPSVLLALGMTISPESPRWLFQQGKISEAEKAVKTLYGKERVALVMHDLTAASEGSSEPEAGWFDLFSSRYRKVVSVGATLFLLQQLAGINAVVYYSTSVFRSAGITSDVAASALVGASNVFGTIVASSLMDKKGRKSLLIX

SEQ ID NO: 23818 - protein, 380 aa, Glycine max
  unsure (1)..(380): unsure at all Xaa locations
MNIMSSSRSRGSWCGLWPGSFNMETELTIRGKSFGGIFGNFSSAKPRSLRVQXXSDEDVEDLLPSNISGKPSGTVLPYVGVACLGAMLFGYHLGVVNGSLEYLAKDLGITQNTVIQGWIVSALLAGATGGSFTGGALADKLGRTRTFQLDAIPLAIGGFLCATAQSVQRLEIGRLLAGIGIGVTSAIVPLYISEISPTEIRGALGSVNQLFICIGILAALLAGLPLVGNPIWWRTMFGITVVPSVLLALGMTISPESPRWLFQQGKISEAEKAVKTLYGKERVALVMHDLTAASEGSSEPEAGWFDLFSSRYRKVVSVGATLFLLQQLAGINAVVYYSTSVFRSAGITSDVAASALVGASNVFGTIVAWRLMKKSRSIAD

SEQ ID NO: 23819 - protein, 535 aa, Oryza sativa (japonica cultivar-group)
MAGTGASVKMIRCVVKCGGQQQHVVVAARGDRKSPAIAAPPPATVRMPGRVLCCGMRSRGADLAGVEMAAGPQPQGGVSGLFRGPRSSPRYSRVRATATVDPEDIPLEKVQAKSSGSVLPYVGVACLGAILFGYHLGVVNGALEYLAKDLGISENAVLQGWVVSTTLAGATAGSFTGGALADKFGRTRTFILDAIPLAVGAFLSATAHDVRTMIIGRLLAGIGIGISSALVPLYISEVFHPLKYVEHLVLLISFLSALEFLLLWWRTMFGISIVPSILLALGMAVSPESPRWLFQQGKLSQAETAIKKLYGREKVAEVMYDLKAASQGSSEPDAGCVGAAMFLFQQLAGINAVVYYSTSVFRSAGIASDVAASALVGAANVFGTMIASSLMDKQGRKSLLITSFSGMAASMLLLSLSFTWKALAPYSGPLAVAGTVLYVLSFALGAGPVPALLLPEIFASRIRAKAVALSLGMHWVSNFFIGLYFLSVVNKFGISTVYLGFASVCALAVVYIAGNVVETKGRSLEEIERALSSAS

SEQ ID NO: 23820 - protein, 535 aa, Oryza sativa; identical to SEQ ID NO: 23819

SEQ ID NO: 23821 - protein, 264 aa, Oryza sativa
VSPESPRWLFQQGKLSQAETAIKKLYGREKVAEVMYDLKAASQGSSEPDAGWLDLFSKRYWKVVSVGAAMFLFQQLAGINAVVYYSTSVFRSAGIASDVAASALVGAANVFGTMIASSLMDKQGRKSLLITSFSGMAASMLLLSLSFTWKALAPYSGPLAVAGTVLYVLSFALGAGPVPALLLPEIFASRIRAKAVALSLGMHWVSNFFIGLYFLSVVNKFGISTVYLGFASVCALAVVYIAGNVVETKGRSLEEIERALSSAS

SEQ ID NO: 23822 - protein, 611 aa, Triticum aestivum
  unsure (1)..(611): unsure at all Xaa locations
IGRGLFVPRELAINPTPLGSRRASARSRRCDDVVFHPSPRQPLHSRKVPLSPPVKMMRCAVRGGGAHVXXIGERRSPSSSPGSGRSVVRMSEGRGGLCCGGVRSRAADLAGLEMGRPSAGAAGLFRCPRYGRVRATASADPEDIPSDKLQAKSSGSVLPYVGVACLGAILFGYHLGVVNGALEYLSKDLGIAENAVLQGWVVSTTLAGATVGSFTGGALADKLGRTRTFILDAIPLAVGAFLSATAQDVRTMIIGRLLAGIGIGISSALVPLYISEISPTEIRGALGTINQLFICIGILAALVAGLPLAQNPAWWRTMFGISIVPSILLALGMAVSPESPRWLFQQGKISQAEAAIKKLYGKEKVTEVMYDLKASGQGSNEPDANWFDLFSKREWGVVSVGAALFLLQQLAGINAVXVYYSTSVFRSAGIASDVAASALVGAANVFGTMIASSLMDKQGRKSLLITSFSGMAASMLLLSLSFTWKALAPYSGTLAVVGTVLYVLSFALGAGPVPALLLPEIFASRIRAKAVALSMGMHWVSNFFIGLYFLSVVNKFGISTVYLGFASVCALAVLYIAGNVVETKGRSLEEIERELSPPNKADANAFLVSDQ

SEQ ID NO: 23823 - protein, 539 aa, Aspergillus oryzae
MTPEKAAMSEHIENDNPARHDDIDLPNSSEAHTAIAKEREMTLWQALRLYPKAVAWSLLFSCAIIMEGYDVVLIGSFLAFPAFNEKYGGLMSDGTYGLEARWQAGVNNAMACGQIIGLFLNGLVSERLGYRKTLMACLAATVGFVFILFFAPNIQTLVVGELFMGIPLGVYQTLVVTYASEVCPVALRAYLTTYVNLCWVLGQLLASGVLKGLAERTDQWAYRIPFALQWIWPIPIFIGVFLAPESPWWLVRQDRREDAVKALKRLTSANADFNAEETVAMIVYTDALERRAETGTSYLDCFKKSDLRRTEISCCAWAAQSLCGAGLMGYSTVFYQRAGLAVSQSFTMSLVQYALGVVGTFVSWTLMSYFGRRTLYVGGLFILAIVLFVIGFVSIAPSTPAISWATGSMLLVYTFIYDSSIGPVCFALVSEIPSSRLRTKTVVLARNVYNILNLVTGIIIPYMLNVDAWNWRGKSGFFWGALCVCCLTWSFFRLPEPKGRSYAELDLLFERGVKTREFATAKTGLEDLQGEGKDDMVKV

SEQ ID NO: 23824 - protein, 170 aa, Brassica rapa subsp. pekinensis
  unsure (1)..(170): unsure at all Xaa locations
GIQSDVAASALVGASNVXGTAVASSLMDKMGRKSLLLTSFGGMALSMLLLSLSFTWKALAAYSGTLAVVGTVLYVLSFSLGAGPVPALLLPEIFASRIRAKAVALSLGMHWISNFVIGLYFLSVVTKFGISSVYLGFAGVCVLAVMYIAGNVVETKGRSLEEIELALTSG

SEQ ID NO: 23825 - protein, 403 aa, Escherichia coli
MSTRTPSSSSSRLMLTIGLCFLVALMEGLDLQAAGIAAGGIAQAFALDKMQMGWIFSAGILGLLPGALVGGMLADRYGRKRILIGSVALFGLFSLATAIAWDFPSLVFARLMTGVGLGAALPNLIALTSEAAGPRFRGTAVSLMYCGVPIGAALAATLGFAGANLAWQTVFWVGGVVPLILVPLLMRWLPESAVFAGEKQSAPPLRALFAPETATATLLLWLCYFFTLLVVYMLINWLPLLLVEQGFQPSQAAGVMFALQMGAASGTLMLGALMDKLRPVTMSLLIYSGMLASLLALGTVSSFNGMLLAGFVAGLFATGGQSVLYALAPLFYSSQIRATGVGTAVAVGRLGAMSGPLLAGKMLALGTGTVGVMAASAPGILVAGLAVFILMSRRSRIQPCADA

SEQ ID NO: 23826 - protein, 435 aa, Escherichia coli
MFAIVAFGLLVCWSNAVGGLILAQLKALGWTDNSTTATFSAITTAGMFLGALVGGIIGDKTGRRNAFILYEAIHIASMVVGAFSPNMDFLIACRFVMGVGLGALLVTLFAGFTEYMPGRNRGTWSSRVSFIGNWSYPLCSLIAMGLTPLISAEWNWRVQLLIPAILSLIATALAWRYFPESPRWLESRGRYQEAEKVMRSIEEGVIRQTGKPLPPVVIADDGKAPQAVPYSALLTGVLLKRVILGSCVLIAMNVVQYTLINWLPTIFMTQGINLKDSIVLNTMSMFGAPFGIFIAMLVMDKIPRKTMGVGLLILIAVLGYIYSLQTSMLLITLIGFFLITFVYMYVCYASAVYVPEIWPTEAKLRGSGLANAVGRISGIAAPYAVAVLLSSYGVTGVFILLGAVSIIVAIAIATIGIETKGVSVESLSIDAVANK

SEQ ID NO: 23827 - protein, 222 aa, Oncorhynchus mykiss
LQNSPLLQLSQQLSGINAVFYYSTRIFEKAGVSQPVYATIGAGVVNTAFTVVSLFIVERAGRRSLHLTGLLGMAFSAVLMTVAMALLDQLPWMSYVSIVAIFSFVAFFEIGPGPIPWFIVAELFSZGPRPSAFAVAGFSNWSANFIVGMTFQYVEQLCGPYVFIIFTVLLLGFFVFTYFMVPETKGRSFDEIAAGFRHDAGEAGEKYAPDEMNSLGGADSQL

SEQ ID NO: 23828 - protein, 469 aa, Escherichia coli K12
MTGRCLFGFSGEKPFLLPDNEGVKMNTSPVRMDDLPLNRFHCRIAALTFGAHLTDGYVLGVIGYAIIQLTPAMQLTPFMAGMIGGSALLGLFLGSLVLGWISDHIGRQKIFTFSFLLITLASFLQFFATTPEHLIGLRILIGIGLGGDYSVGHTLLAEFSPRRHRGILLGAFSVVWTVGYVLASIAGHHFISENPEAWRWLLASAALPALLITLLRWGTPESPRWLLRQGRFAEAHAIVHRYFGPHVLLGDEVVTATHKHIKTLFSSRYWRRTAFNSVFFVCLVIPWFVIYTWLPTIAQTIGLEDALTASLMLNALLIVGALLGLVLTHLLAHRKFLLGSFLLLAATLVVMACLPSGSSLTLLLFVLFSTTISAVSNLVGILPAESFPTDIRSLGVGFATAMSRLGAAVSTGLLPWVLAQWGMQVTLLLLATVLLVGFVVTWLWAPETKALPLVAAGNVGGANEHSVSV

SEQ ID NO: 23829 - protein, 418 aa, Escherichia coli K12
MYQSRFTCTRNEVHLMSTRTPSSSSSRLMLTIGLCFLVALMEGLDLQAAGIAAGGIAQAFALDKMQMGWIFSAGILGLLPGALVGGMLADRYGRKRILIGSVALFGLFSLATAIAWDFPSLVFARLMTGVGLGAALPNLIALTSEAAGPRFRGTAVSLMYCGVPIGAALAATLGFAGANLAWQTVFWVGGVVPLILVPLLMRWLPESAVFAGEKQSAPPLRALFAPETATATLLLWLCYFFTLLVVYMLINWLPLLLVEQGFQPSQAAGVMFALQMGAASGTLMLGALMDKLRPVTMSLLIYSGMLASLLALGTVSSFNGMLLAGFVAGLFATGGQSVLYALAPLFYSSQIRATGVGTAVAVGRLGAMSGPLLAGKMLALGTGTVGVMAASAPGILVAGLAVFILMSRRSRIQPCADA

SEQ ID NO: 23830 - protein, 387 aa, Salmonella enterica subsp. enterica serovar Typhi
MPQPRNFDDLKFSSIHRRIMLWGSGGPFLDGYVLVIIGVALEQLTPLLHLDAEWIGALGAATLAGLFIGTSLFGYICDKVGRRKMFLLDIIAIGVISVATMFVSTPLELLVMRVLIGIVIGADYPIATSMITEFSNTRQRAFSIGFIAAMWYVGATCANLVGYWLYDMEGGWRWMLGSAFIPCLIILIGRFDLPESPRWLLRKGRVKECEQMMIKLFGEPVCFDDEPPQETRFLQLFNRRHFPFVLFVAAIWSCQVIPMFAIYTFGPQIVGLLGWEQGRNAALGNVVISLFFMLGCIPAMFWLNSIGRRPLLIGSFAMMTIALALLGLVSNLGIILVVVAFAVYAFFSGGPGILQWLYPNELFPTDIRASAVGVIMSLSRIGTIVST

SEQ ID NO: 23831 - protein, 161 aa, Ovis aries
FGRRNSMLIVNLLAIAGGCLMGFCKIAESVEMLILGRLIIGLFCGLCTGFVPMYIGEISPTALRGAFGTLNQLGIVIGILVAQIFGLKVILGTEDLWPLLLGFTILPAIIQCAALPFCPESPRFLLINRKEEEKAKEILQRLWGTEDVAQDIQEMKDESMR

SEQ ID NO: 23832 - protein, 753 aa, Hordeum vulgare subsp. vulgare
MRRGGWRSWRGCRGWRARRSSRLRRGWRRRRAGAGAGARKDLAALQAEWKSLEEEELVMAAAAKLVFLASNVMLWAPNVYVLLLARLIDGFGIGLAVTLVPLYISETAPTDIRGLLNTLPQFSGSGGMFLSYCMVFTMSLMPQPDWRIMLGVLSIPSLMYFALTVFYLPESPRWLVSKGRMAEAKRVLQRLRGREDVSGEMALLVEGLGVGKTHIEEYIIGPDDELADDGLAPDQEKLKLYGAEEGVSWIARPVRGGGQSALGSALGLMSRHGSMVSQGKSLVDPLVTLFGSVHEKMPEVMGSMRSTLFPNFGSMFSVAEQQQAKADWDAESHRDDEDYASDHGADDIEDNLNSPLISRQATSVEGKEIAAPHGSIMGGVESSSMQGGDAVSSMGIGGGWQLAWKWTEREGADGRKEGGAQRIYLHEEGVSGDRRGSILSMPGGDIPPGGEYIQAAALVSQPALYSKDLIEQQLAGPAMVHPSEAVAKGTKWAELFEPGVKHALFVGIGLQILQQFAGINGVLYYTPQILEQAGVGILLSNIGLSSSSASILISALTTLLMLGYISDRIGARAITAASFMYCSIPALFFYRRAILVLVNVLDVGTMVHAALSTISVIVYFCFFVMGPIPEGSTSSVKIDTDRANAASLAKALLTFWIGDIIVTYTLPVMLNAIGLAGVFGIYAVVCMIAFVFVYMKVPETKGMPLEVITEFFSVGAKQGKEATDEVAEKIAESRPSEECRSPVDYVQDHVMEV

SEQ ID NO: 23833 - protein, 513 aa, Apium graveolens var. dulce
MITGEVSVDSYDTNKPKPKRNKYAFACALLASMNSILLGYDTGVLSGASIYIKEDLHFSDVQIEIIIGIINIYSLLGSAIAGRTSDWIGRRYTMVLAGIIFFLGAIFMGLATNFAFLMFGRFVAGIGVGYAMMIAPVYTAEVAPSSSRGFLTSFPEVFINSGVLLGYVSNFAFAKCPLWLGWRIMLGIGAFPSVALAIIVLYMPESPRWLVMQGRLGEARTVLEKTSTSKEEAHQRLSDIKEAAGIDKDCNDDVVQVPKRTKDEAVWKELILHPTKPVRHAAITGIGIHFFQQACGIDAVVLYSPRIFEKAGIKSNSKKLLATIAVGVCKTVFILISTFQLDKIGRRPLMLTSMGGMVIALFVLAGSLTVINKSHHTGHWAGGLAIFTVYAFVSIFSSGMGPIAWVYSSEVFPLRLRAQGCSIGVAVNRGMSGIIGMTFISMYKAMTIGGAFLLFAVVASIGWVFMYTMFPETQGRNLEEIELLFGSYFGWRKTLKDLKAKEAAEAKSRESEV

SEQ ID NO: 23834 - protein, 459 aa, Escherichia coli O157:H7 EDL933
MDQITKPHCGARLDRLPDCRWHSSMFAIVAFGLLVCWSNAVGGLILAQLKALGWTDNSTTATFSAITTAGMFLGALVGGIIGDKTGRRNAFILYEAIHIASMVVGAFSPNMDFLIACRFVMGVGLGALLVTLFAGFTEYMPGRNRGTWSSRVSFIGNWSYPLCSLIAMGLTPLISAEWNWRVQLLIPAILSLIATALAWRYFPESPRWLESRGRYQEAEKVMRSIEEGVIRHTGKPLPPVVIADDGKAPQAVPYSALLTGVLLKRVILGSCVLIAMNVVQYTLINWLPTIFMTQGINLKDSIVLNTMSMFGTPFGIFIAMLVMDKIPRKTMGVGLLILIAVLGYIYSLQTSMLLITLIGFFLITFVYMYVCYASAVYVPEIWPTEAKLRGSGLANAVGRISGIAAPYAVAVLLSSYGVTGVFILLGAVSIIVAIAIATIGIETKGVSVESLSIDAVANK

SEQ ID NO: 23835 - protein, 459 aa, Escherichia coli CFT073
MEQITKPHCGARLDRLPDCRWHSSMFAIVAFGLLVCWSNAVGGLILAQLKALGWTDNSTTATFSAITTAGMFLGALVGGIIGDKTGRRNAFILYEAIHIASMVVGAFSPNMDFLIACRFVMGVGLGALLVTLFAGFTEYMPGRNRGTWSSRVSFIGNWSYPLCSLIAMGLTPLISAEWNWRVQLLIPAILSLIATALAWRYFPESPRWLESRGRYQEAEKVMRSIEEGVIRQTGKPLPPVVIADDGKAPQAVPYSALLTGVLLKRVILGSCVLIAMNVVQYTLINWLPTIFMTQGINLKDSIVLNTMSMFGAPFGIFIAMLVMDKIPRKTMGMGLLILIAVLGYIYSLQTSMLLITLIGFFLITFVYMYVCYASAVYVPEIWPTEAKLRGSGLANAVGRISGIAAPYAVAVLLSSYGVTGVFILLGAVSIIVAIAIATIGIETKGVSVESLSIDAVANK

SEQ ID NO: 23836 - protein, 202 aa, Leuconostoc mesenteroides subsp. mesenteroides ATCC 8293
  unsure (1)..(202): unsure at all Xaa locations
MENGSTKRIASSFIYFFGAFGGILFGYDIGVMTGALPFLQKDWHLTDAGTIGWITSTLMLGAILGGALAGQLSDRLGRRRMILASSFIFAVGAIMAGVSPNNGVVWLLIARFLLGLAVGAASALVPSYMSEMAPAKNRGRLSGLNQLMIVSGMLLSYIVDYLLQGLPHTIAWRLMLGLXXXXXXXXXXXXXXXXXRHSVSHM

SEQ ID NO: 23837 - protein, 547 aa, Arabidopsis thaliana
MMKNLPEVGNGGGSGFPAVSVGNKKNKYQRMDSDAEESQNHREAEARNSRTRKYVMACAFFASLNNVLLGYGRFYLYNRILLLLLYFVDLQKDVGVMSGAVLFIQQDLKITEVQTEVLIGSLSIISLFGSLAGGRTSDSIGRKWTMALAALVFQTGAAVMAVAPSFEVLMIGRTLAGIGIGLGVMIAPVYIAEISPTVARGFFTSFPEIFINLGILLGYVSNYAFSGLSVHISWRIMLAVGILPSVFIGFALCVIPESPRWLVMKGRVDSAREVLMKTNERDDEAEERLAEIQLAAAHTEGSEDRPVWRELLSPSPVVRKMLIVGFGIQCFQQITGIDATVYYSPEILKEAGIQDETKLLAATVAVGVTKTVFILFATFLIDSVGRKPLLYVSTIGMTLCLFCLSFTLTFLGQGTLGITLALLFVCGNVAFFSIGMGPVCWVLTSEIFPLRLRAQASALGAVGNRVCSGLVAMSFLSVSRAITVGGTFFVFSLVSALSVIFVYVLVPETSGKSLEQIELMFQGGLERKDGEVELGDAERLVRKEQEF

SEQ ID NO: 23838 - protein, 557 aa, Glycine max
  unsure (1)..(557): unsure at all Xaa locations
LKGSNLRQFSQVRTSKRTQGPIGIRIKLMGFQENGNXGNGVVWNPLGSKXNKYKRMTSELPDDKHQQQVEERRSSTRKYVIACAIFASLNNVLLGXXDVGVMSGXAVIFIKEDLKISEVQVEFLIGILSIISLFGSLGGGRTSDIIGRKWTMALAAVVFQMGGLTMTLAPSYAVLMVGRFLAGIGIGFGVMISPIYIAEISPNLNRGSLTAFPEIFINVGIMLGYVSNYAFSGLSAHISWRVMLAVGILPSVFIGFALFVIPESPRWLVMQNRIDEARSVLLKTNEDEKEVEERLAEIQQAAGFANSDKYDDKPVWRELLFPPPPLRRMLITGLGIQCFQQISGIDATVYYSPEIFQAAGIEDNSKLLAATVAVGISKTIFILVAIILIDKLGRNTAARRRQKGMTVCLFCMGATLALLGKGSFAIALSILFVCGNVAFFSVGLGPVCWVLTSEIFPLRVRAQASALGAVANRVCSGLVAMSFLSVSEAISVAGTFFAFSAISALAIAFVVTLVPETKGKSLEQIEMMFQNEYEIQGKETELGDVEQLVQNQTDLTN

SEQ ID NO: 23839 - protein, 417 aa, Glycine max
RTSDIIGRKWTMALAAVVFQMGGLTMTLAPSYAVLMVGRFLAGIGIGFGVMISPIYIAEISPNLNRGSLTAFPEIFINVGIMLGYVSNYAFSGLSAHISWRVMLAVGILPSVFIGFALFVIPESPRWLVMQNRIDEARSVLLKTNEDEKEVEERLAEIQQAAGFANSDKYDDKPVWRELLFPPPPLRRMLITGLGIQCFQQISGIDATVYYSPEIFQAAGIEDNSKLLAATVAVGISKTIFILVAIILIDKLGRKPLLMISTIGMTVCLFCMGATLALLGKGSFAIALSILFVCGNVAFFSVGLGPVCWVLTSEIFPLRVRAQASALGAVANRVCSGLVAMSFLSVSEAISVAGTFFAFSAISALAIAFVVTLVPETKGKSLEQIEMMFQNEYEIQGKETELGDVEQLVQNQTDLTN

SEQ ID NO: 23840 - protein, 506 aa, Oryza sativa (japonica cultivar-group)
MGEEKQNDERKNKYAVGCSIIGSIISVLMGYDTGVMSGAMLFIKEDLKTNDTQVQVLAGILNVCALVGSLTAGRVSDCVGRRLTISLAACIFLVGSVLMGLAPNFATLLAGRCVAGVGVGYALMIAPVYAAEIASADIRGSLTSLPEICISFGILIGYVANYLLAKLPLVYGWRAMLGLGALPSAALALGVLAMPESPRWLVVQGRAEEALSVLRRVCDRPSEADARLAEIKAAAGLADDDGAAANAGSGGKGVWRELFLHPTPPVRRIVIAALGIHFFQHLTGIEAVVLYSPRIFKAAGIASRNSVLAATIGVGVTKTAFILTAILLVDRIGRRPLYLSSLAGIIASLACLGMGLTVIERSPPHHSPAWAVVLAIATVFTFVASFSIGVGPITWAYSSEVYPLRLRAQGASVGVAINRVMNAGVSMTFVSLYKAITIGGAFFLFAGLAVAAATFFYLLCPETQGKPLEEIEEVFSQGWRARRRASAAAVEMPASGGGGGGGAPMA

SEQ ID NO: 23841 - protein, 511 aa, Oryza sativa (japonica cultivar-group)
MTSQLGSARRPSKFQPLQINYICGASLFIKEDMKITDVEVEILLGILNLYSLVGSFAAGRTSDWIGRRLTIILAAVIFFVGAIMMGLSVNYPMLMAGRFVAGIGVGYAFMIAPVYTAEVSPASSRGFLTSFPEVFINFGILLGYVSNYAFSRLRLQLGWRLMLGVGAAPSVALALMVLAMPESPRWLVMKGRLADAKVVLGETSDTAEEAATRLAEIKEAVAIPADLDGDVVAVPKRAGGERRVWKELILSPTPAVRRVLLSALGIHFFQQSSGIDAVVLYSPRVFQSAGITDKNKLLGTTCAVGVTKTLFILVATFTLDRFGRRPLLLASAGGMIATLVTLGLGLTVIGEDATGGGWAIAVSIASILAFVAFFSIGLGPITWVYSSEIFPLHLRALGCALGVGLNRVTSGVISMTFLSLSKAITIGGSFFLYAGVASLAWLFFFTYLPETRGRTLEQMGELFRIHNMAGDDDSAATRPPSPEEEEKITNYVEMAAPSSSSSTATSSHHAK

SEQ ID NO: 23842 - protein, 521 aa, Oryza sativa
MAGAEAANGRNKYAVLDPSDEPEGRRRPSAWERRSKERFVLACAIFASLNAILLGYDVGVMSGAIIYIQKDLHITEFQEEILVGCLSVVSLLGSLSGGRTSDAIGRKWTMALGAIVFQAGAAIMTFAPSFTVLMIGRLLAGVGIGFGAMVSAVYIAEISPAAARGTLTSLPEICINLGILLGYVSNYAFSGLSEHINWRIMLGVGILPSVFIGFALFVIPESPRWLMMEKRVPEARAVLLQISESEAEVEERIAEIEEAANQSTKSEDKAVWMELLNPSPAVRRMLYAGCGIQMFQQITGIDATVYYSPTIFRDAGIKSDQELLAATVAVGFTKTVFILVAIFLIDKVGRKPLLYVSTIGMTMCLFVLGIALTLQKHAMGLISPRIGIDLAVFAVCGNVAFFSIGMGPICWVLSSEIFPLRLRAQASALGQVGGRVSSGLVSMSFLSMARIISVAGMFFVFAVISTVSVAFVYFCVPETKGKTLEQIEMMFEGGKEWRGSEIELEDTQHLIQSSKKSVSLG

SEQ ID NO: 23843 - protein, 547 aa, Oryza sativa
  unsure (1)..(547): unsure at all Xaa locations
WIAGSPEGGGDGGRGXAANGRNKYAVLDPSDEPEGRRRPSAWERRSKERFVLACAIFASLNAILLGYGEFIFYNPVLMLYLXDVGVMSGAIIYIQKDLHITEFQEEILVGCLSVVSLLGSLSGGRTSDAIGRKWTMALGAIVFQAGAAIMTFAPSFTVLMIGRLLAGVGIGFGAMVSAVYIAEISPAAARGTLTSLPEICINLGILLGYVSNYAFSGLSEHINWRIMLGVGILPSVFIGFALFVIPESPRWLMMEKRVPEARAVLLQISESEAEVEERIAEIEEAANQSTKSEDKAVWMELLNPSPAVRRLLSTHCGRQMFQQITGIDATVYYSPTIFRDAGIKSDQELLAATVAVGFTKTVFILVAIFLIDKVGRKPLLYVSTIGMTMCLFVLGIALTLQKHAMGLISPRIGIDLAVFAVCGNVAFFSIGMGPICWVLSSEIFPLRLRAQASALGQVGGRVSSGLVSMSFLSMARIISVAGMFFVFAVISTVSVAFVYFCVPETKGKTLEQIEMMFEGGKEWRGSEIELEDTQHLIQSSKKSVSLG

SEQ ID NO: 23844 - protein, 536 aa, Oryza sativa
  unsure (1)..(536): unsure at all Xaa locations
MGLPGAEPPAASGGGLPGFFGGKSKYVRMDDVLPQEQEEEEAEASASXRSHSSRRYVFACSVFASLNSVLLGYDVGVMSGCILFIQRDLHINEVQQEVLVGCLSFISLLGSLAGGRTSDAVGRKWTIGLAAIVFQAGAAVMTLAPSFEVLMVGRLLAGVGIGFGVMIAPVYIAEISPAASRGSFTSFPEIFINLGILLGYISNYAFSGLPDHVSWRVMLAVGILPSVSIAFALLVIPESPRWLVMKNRADEAREVLLKVTDSEDEAKERLAEIERAAAAVASAGKYGDKTVWQELTRPSPVIRRMLITGLGIQCFQQITGIDALVYYSPTIFRDAGITTESQLLVATVAVGFFKTAFIALAIVLIDRVGRKPLLYVSTVGMTACLVVLAATLAALAHGSASRSAGIAVAILTVCGDVAFFSVGIGPICWVMSSEIFPLRLRSQAAALGAVMNRVTSGAVAMSFLSVCRAISVAGAFSVFAVISALSVVFVYRYVPETSGKTLEEIELLFGGGGGDGEAARGEVELGDGEHLVHKGX

SEQ ID NO: 23845 - protein, 563 aa, Oryza sativa
  unsure (1)..(563): unsure at all Xaa locations
AEGMGLPGAEPPAASGGGLPGFFGGKSKYVRMDDVLPQEQEEEEAEASASXRSHSSRRYVFACSVFASLNSVLLGYGNYLLRFHMNLSRTYMCSLFPDVGVMSGCILFIQRDLHINEVQQEVLVGCLSFISLLGSLAGGRTSDAVGRKWTIGLAAIVFQAGAAVMTLAPSFEVLMVGRLLAGVGIGFGVMIAPVYIAEISPAASRGSFTSFPEIFINLGILLGYISNYAFSGLPDHVSWRVMLAVGILPSVSIAFALLVIPESPRWLVMKNRADEAREVLLKVTDSEDEAKERLAEIERAAAAVASAGKYGDKTVWQELTRPSPVIRRMLITGLGIQCFQQITGIDALVYYSPTIFRDAGITTESQLLVATVAVGFFKTAFIALAIVLIDRVGRKPLLYVSTVGMTACLVVLAATLAALAHGSASRSAGIAVAILTVCGDVAFFSVGIGPICWVMSSEIFPLRLRSQAAALGAVMNRVTSGAVAMSFLSVCRAISVAGAFSVFAVISALSVVFVYRYVPETSGKTLEEIELLFGGGGGRRRGGAGXEVELGDGEHLVHKGXGS

SEQ ID NO: 23846 - protein, 530 aa, Oryza sativa
  unsure (1)..(530): unsure at all Xaa locations
MGLRATEAATGNGGGMRSLPVLGRKSKYVRMDDVLPDEQGDGGGGXRRRSCPRRRRQRXRYVFACSVFASLNHVLLGYDVGVMSGCIIFIQKDLHISEVQQEVLVGCLSFISLLGSLAAGRTSDAVGRKWTIGLAAAVFQAGAAVMTLAPSFAVLMMGRLLAGIGIGIGIMVAPVYISEITPATLRGSYASFPEIFISLGILLGYVSNLAFSGLPDHINWRVMLAAGIVPSISVAFVLLVIPESPRWLVMQGRAAKARAVLLKVTDGEDEAQERLAEIEEAARVTATGNGKAVWRELLRPSPVIRRMLVTGIGVQLFQQITGIDALVYYSPTIFRDAGITTESQLLAATVGVGLSKTVFIVIAIVLVDRVGRKPLLYVSTAGITACLAALAASLSLLAHGALPRAAAIGAAHXLTVCGFVAFFSVGIGPINMVLSSEIYPLRLRAQAXXTSGPVPMSFLSFSAPVSVPGAXFAAFAAFSALSVVFVHVFVPEMSGKSLEQIESLFGAGAXXPGEVKLGNAEHLVQGKEMS

SEQ ID NO: 23847 - protein, 558 aa, Oryza sativa
  unsure (1)..(558): unsure at all Xaa locations
MGLRATEAATGNGGGMRSLPVLGRKSKYVRMDDVLPDEQGDGGGGXRRRSCPRRRRQRXRYVFACSVFASLNHVLLGYGKYLCTNCQILCYIVAVNXSDVGVMSGCIIFIQKDLHISEVQQEVLVGCLSFISLLGSLAAGRTSDAVGRKWTIGLAAAVFQAGAAVMTLAPSFAVLMMGRLLAGIGIGIGIMVAPVYISEITPATLRGSYASFPEIFISLGILLGYVSNLAFSGLPDHINWRVMLAAGIVPSISVAFVLLVIPESPRWLVMQGRAAKARAVLLKVTDGEDEAQERLAEIEEAARVTATGNGKAVWRELLRPSPVIRRMLVTGIGVQLFQQITGIDALVYYSPTIFRDAGITTESQLLAATVGVGLSKTVFIVIAIVLVDRVGRKPLLYVSTAGITACLAALAASLSLLAHGALPRAAAIGAAHXLTVCGFVAFFSVGIGPINMVLSSEIYPLRLRAQAVALGFSVNRLTSGPVPMSFLSFSAPVSVPGAXFAAFAAFSALSVVFVHVFVPEMSGKSLEQIESLFGAGAXXPGEVKLGNAEHLVQGKEMS

SEQ ID NO: 23848 - protein, 485 aa, Oryza sativa
  unsure (1)..(485): unsure at all Xaa locations
MGLRATEAATGNGGGMRSLPVLGRKSKYVRMDDVLPDEQGDGGGGXRRRSCPRRRRQRXRYVFACSVFASLNHVLLGYDVGVMSGCIIFIQKDLHISEVQQEVLVGCLSFISLLGSLAAGRTSDAVGRKWTIGLAAAVFQAGAAVMTLAPSFAVLMMGRLLAGIGIGIGIMVAPVYISEITPATLRGSYASFPEIFISLGILLGYVSNLAFSGLPDHINWRVMLAAGIVPSISVAFVLLVIPESPRWLVMQGRAAKARAVLLKVTDGEDEAQERLAEIEEAARVTATGNGKAVWRELLRPSPVIRRMLVTGIGVQLFQQITGIDALVYYSPTIFRDAGITTESQLLAATVGVGLSKRTAGITACLAALAASLSLLAHGALPRAAAIGRPILTVCGFVAFFSVGIGPINMXXTSGPVPMSFLSFSAPVSVPGAXFAAFAAFSALSVVFVHVFVPEMSGKSLEQIESLFGAGAXXPGEVKLGNAEHL

SEQ ID NO: 23849 - protein, 262 aa, Triticum aestivum
  unsure (1)..(262): unsure at all Xaa locations
XRMLVTGLGIQCFQQITGIDALVYYSPTIFRDAGVTTESQLLLATVAVGFFKTAFIALAIVLIDRVGRKPLLYVSTVGMTVCLVILASTLWLLAHGAVPKALXGVAVAVVAVCGDVAFFSVGIGPVCWVTSSEIFPLRLRSQAAALGAAVNRVTSGTVAMSFLSVSRAMTVAGAFSAFAAISALSVVFVHRFVPETKGKTLEEIELLFGGGEGGEGVTVSPGEVELGDAEHLVRKGXEGPCTLMDPFGIVTPVWMFSFRMCI

SEQ ID NO: 23850 - protein, 352 aa, Triticum aestivum
  unsure (1)..(352): unsure at all Xaa locations
PTRPPTRPLLSYVSNYALAGLPVHLSWRVMYAIGVLPPVLLAAGVLAMPESPRWLAMRGREADARAVLVGTSDTAAEAELRFEEIKRVVEAPREADSXXVWRELIFRPSAMVRRILVFVVGLNFLQQALGVDAILLYSPLMFKKAGMSSNSAILGATVAIGVVKTCFILVVSLFSDRFGRRPLLLASAGGVAASLTGLALTLCIGGRRQRARLPXVAFTLATVAAFSVGWGSLPSTYTAEITPLRLRAQGSSLGMAVNRLTCGVVSMSFISLAGWITMPGCFFLYASMAATAYVFVFLRLPETKGRTLEEMDVLFSDRDQXKASTPQKKKKKSLSIPSTSRGGPVPNSXXXX

SEQ ID NO: 23851 - protein, 545 aa, Caenorhabditis elegans
MVEAPSFRMICVAVITSIAGSFHFGFNLVLTNPSQEAFLNFMNQTLAKRFDGGLSDNTLQNIWSFVVAILFLGALAGSFSIRLIADWIGRKNGLYISIAVGVLAGGMSIASKFIPLFELYIASRIVMGWSVSVSLGLSALFLSEASPKQNRGAIGMMTGTCVQLGTVCGSVIAMPQIFGTEDLWWLIYATEIGIMLFFGAALPFFPESPGFLIQRGATEAATKSIAYYYNCEIDEAEKHLNEIKEEQKNSTKNFKMMDIVRKKSLRDKAFIGVVVTFAMSFSGVAVINAFAFDILKDTGLKVLEASLANDAISVVSMISSIVAAVIVDRNGRRPLLLISFAGILVCNLIIFALMFTFYKFEWCFYVAKIFLIFLGLKIAITLHKKLVSIFQNHVLGFILICFICIFTFFFALGPGPLCYFINAELVGQAARSAAQSWASVIQMLSRFVIVTAFLPMKNQLGEAWSYLILFVAPVAASLVYLYFSLPETKNKNPFEVEEAIEDLPKFPLCGKNRVYDRKQSQEMVLSRQMQLVVDYGSIESLSYRL

SEQ ID NO: 23852 - protein, 459 aa, Escherichia coli K12
MEQITKPHCGARLDRLPDCRWHSSMFAIVAFGLLVCWSNAVGGLILAQLKALGWTDNSTTATFSAITTAGMFLGALVGGIIGDKTGRRNAFILYEAIHIASMVVGAFSPNMDFLIACRFVMGVGLGALLVTLFAGFTEYMPGRNRGTWSSRVSFIGNWSYPLCSLIAMGLTPLISAEWNWRVQLLIPAILSLIATALAWRYFPESPRWLESRGRYQEAEKVMRSIEEGVIRQTGKPLPPVVIADDGKAPQAVPYSALLTGVLLKRVILGSCVLIAMNVVQYTLINWLPTIFMTQGINLKDSIVLNTMSMFGAPFGIFIAMLVMDKIPRKTMGVGLLILIAVLGYIYSLQTSMLLITLIGFFLITFVYMYVCYASAVYVPEIWPTEAKLRGSGLANAVGRISGIAAPYAVAVLLSSYGVTGVFILLGAVSIIVAIAIATIGIETKGVSVESLSIDAVANK

SEQ ID NO: 23853 - protein, 246 aa, Ovis aries
MAAMQFLWGSAPGWEEPPTGAEHQGFHVAQLRCPGIYKPFIIGISLMAFQQLSGVNAVMFYAETIFEEAKFKDSSLASVVVGVIQVLFTATAALIMDRAGRRLLLTLSGVVMVFSTSAFGAYFKLTEGGPSNSSHVDLPAPVSMEPANTNVGLAWLAVGSMCLFIAGFAVGWGPIPWLLMSEIFPLHVKGVATGVCVLTNWFMAFLVTKEFSSLMEVLRPYGAFWLASAFCIFGVLFTLACVPETK

SEQ ID NO: 23854 - protein, 497 aa, Mus musculus
MQEPLLRTEGLDYDTFPEVPATPGERERAGALKNRRVFLATFAAVLGNFSFGYALVYTSPVIPELKLSSDPALHLDKIQASWFGSVFTLGAAAGGLSAMLLNDLLGRKLSIMFSAVPSAIGYAIMAGARGLWMLLLGRMLTGFAGGLTAACIPVYVSEIAPPDVRGALGATPQLMAVFGSLSLYALGLLLPWRWLAVAGEGPVLIMILLLSFMPNSPRFLLSKSRDEEALQALTWLRADSEVHWEFEQIQDNVRRQSSRVSWAEAREPRVYRPVLIAVLMRFLQQLTGITPILVYLQTIFDNTSVVLPSQQDAAIVGAVRLLSVLIAAVTMDLAGRKVLLYVSASVMFAANLTLGLYVQFVPRPLTPNSTVEIVILGDTAFNYLTLIPLLATMLFIMGYAMGWGPITWLLMSEVLPLRARGVASGLCVLVSWLTAFVLTNYFLLAVNAFGLQVPFFFFSAICLLSLLFTGCCVPETRGRSLEQIEAFFHTRRMSFRP

SEQ ID NO: 23855 - protein, 523 aa, Apium graveolens var. dulce
MAGAFNVSGDDSGGSKDVGSPVIFDAVKKPKRNKYAFGCAILASMTSVLLGYDIGVMSGAAIYIKDQLHVSDVKLEIVVGIINFFSLVGSALAGRTSDWIGRRYTMVLAGAIFFVGAILMGFATNYSFLMFGRFVAGIRSRLCPHDCSGVHGRGFFSIISWISYFIPGSFINIGVLLGYVSNYAFSKLPANLGWRFMLGIGAIPSIGLAIGVLGMPESPRWLVMKGRLGEARQVLDKTSDSKEESRLRLSDIKQAAGIPEECNDDIVVMPKRRNDEAVWKELLLHPTPSVRHAFIAGVGLHFFQQSSGIDAGGLYSPRIFEKAGITSTDLKLLATIAVGISKTLFILVATFLLDRIGRRPLLLTSMGGMIISLTLLGTSLAVIATQITQFIGPGHWQSSEVYHTWAVFFWLGPIAWGYSSEVFPLRLRAQGCSIGVAVNRGTSGIISMTFLSLYKAISIAGAFYLFAAIAGVAWIFIFTLLPETQGRSLEEMGLLFGTYFGWRKTLKGLKNREAEEAKNANVI

SEQ ID NO: 23856 - protein, 514 aa, Ralstonia metallidurans
MVESPVAPLFRPREPARQEEDQHAKHYSVQNTPGKEPSIPGRQSDIPARLDRLPWSAWHWRVAIALGIAWVLDGLEVTLVGSVGAVLERPDTLALNATQVGWSGSLYVLGAVIGALAFGRMADRLGRKKLFLATLFVYMAATLATAFSPNFAFFAACRFVTGLGIGGEYAAINSAIDELIPARVRGRVNLAINGSFWLGAALGAGLSLLLLDPRVLGPVWGWRACFALGALLAVAIVLIRRHVPESPRWLATHGRHAEAEQVIAGIEAAITRRHGPLPPVHDAVLVYYGGKPVPPLRDVVRLLVRRYRTRSAVTFALMVAQAFFYNAIFFTYALVLTRFLGVPEERVALYIFPFAIGNALGPLLLGPLFDRIGRRKMIALTYVLSGIGLAATGWAFMSGWLDARSQALCWSAVFFLASAAASSAYLTASEVFPLEMRALAISVFYAVGTGVGGFIAPVLFGALIETGSRGAVAVGYAIGATLVIVAGAMALKYGVDAERKPLEEVAPPLGTDDE

SEQ ID NO: 23857 - protein, 487 aa, Burkholderia fungorum
MASPDHAGSVANSSGAVYSDTAATSARAATPLDAGSISARLDRLPATRSIWKLVVLLSLGFFFELYDLLYSGYVAPGLVKSGLLTATTHGLFGSTGVASFIAALFSGLFIGTIACGFLADRFGRRAVFTYSLLWYTAANIVMAFQETATGLNFWRFLAGIGIGVELVTIGTYISELVPKQIRGRAFACEQAVGFTAVPVVAFLSYLLVPRTLLGLDGWRWVVLIGAHGALFVWWIRRALPESPRWLAQQGRLAEADRVMTELEAKVRREYGRELPPPAPPVPVAPRGSFRDMWVPPYRSRTLMMTIFNIFQTVGFYGFANWVPTLLIKQGITITTSLMYSSVIALAAPLGPVIGLFIGDRFERKTVIVVMAGVNIVCGLWFSQAAGAVLLVSLGVGLTLAGNIISYSFHAYQAELFPTSIRARAVGFVYSWSRFSAIFTAFLIAAVLKHFGTGGVFVFIAGAMLIVMLAIGLMGPRTNGIELEKISK

SEQ ID NO: 23858 - protein, 509 aa, Prunus cerasus
MTDRRAQDNAVSGQPLLKKKPKRNLYAIGCAILASMTSILLGYDIGVMSGASIYIQKDLKISDVEVEILIGILNLYSLIGSAAAGRTSDWIGRRYTIVFAGAIFFTGALLMGLATNYAFLMVGRFVAGIGVGYALMIAPVYNAEVSPASSRGALTSFPEVFVNIGILLGYVANYAFSGLPIDLGWRLMLGVGVFPSVILAVGVLSMPESPRWLVMQGRLGEAKQVLDKTSDSLEEAQLRLADIKEAAGIPEHCVEDVVQVPKHSHGEEVWKELLLHPTPPVRHILIAAIGFHFFQQLSGIDALVLYSPRIFEKAGITDSSTLLLATVAVGFSKTIFTLVAIGFLDRVGRRPLLLTSVAGMIASLLCLGTSLTIVDHETEKMMWASVLCLTMVLAYVGFFSIGMGPIAWVYSSEIFPLKLRAQGCSMGTAVNRIMSGVLSMSFISLYKAITMGGTFFLYAGIATVGWVFFYTMLPETQGRTLEDMEVLFGKFWRWREGYALLRNKRAVVC

SEQ ID NO: 23859 - protein, 538 aa, Prunus cerasus
MADRRAEYNAVVSGQPQKNIADFDPPGKPKRNKYAFACAILASMTSILLGYDIGVMSGAVIYIKKDLKVSDVEIEVLVGILNLYSLIGSAAAGRTSDWIGRRYTIVLAGAIFFAGALLMGFAPNYAFLMFGRFVAGIGVGYALMIAPVYTAEVSPASSRGFLTSFPEVFINAGILFGYVSNYGFSKLPTHLGWRLMLGVGAIPSIFLAIGVLAMPESPRWLVMQGRLGDARKVLDKTSDSLEESKLRLGEIKEAAGIPEHCNDDIVEVKKRSQGQEVWKQLLLRPTPAVRHILMCAVGLHFFQQASGIDAVVLYSPRIFEKAGITNPDHVLLCTVAVGFVKTVFILVATFMLDRIGRRPLLLTSVAGMVFTLACLGLGLTIIDHSGEKIMWAIALSLTMVLAYVAFFSIGMGPITWVYSSEIFPLQLRAQGCSIGVAVNRVVSGVLSMTFISLYKAITIGGAFFLFAAIAAVGWTFFFTMLPETQGRTLEDMEVLFGKFYRWRKANALLKQKKQVDHGDGNNNPNNPQIQLGTKGQAN

SEQ ID NO: 23860 - protein, 416 aa, Escherichia coli O157:H7 EDL933
MSYSGNVVLAKLVSNGWSNNFLNAAFTSALMFGYFIGSLTGGFIGDYFGRRRAFRINLLIVGIAATGAAFVPDMYWLIFFRFLMGTGMGALIMVGYASFTEFIPATVRGKWSARLSFVGNWSPMLSAAIGVVVIAFFSWRIMFLLGGIGILLAWFLSGKYFIESPRWLAGKGQIAGAECQLREVEQQIEREKSIRLPPLTSYQSNSKVKVIKGTFWLLFKGEMLRRTLVAITVLIAMNISLYTITVWIPTIFVNSGIDVDKSILMTAVIMIGAPVGIFIAALIIDHFPRRLFGSTLLIIIAVLGYIYSIQTTEWAILIYGLVMIFFLYMYVCFASAVYIPELWPTHLRLRGSGFVNAVGRIVAVFTPYGVAALLTHYGSITVFMVLGVMLLLCALVLSIFGIETRKVSLEEISEVN

SEQ ID NO: 23861 - protein, 490 aa, Beta vulgaris
MSSDSEAGLGGGGGDLRKPFLHTGSWYRMGSRQSSLMGSSQVIRESSISVLACVLIVALGPIQFGFTAGYSSPTQSAITNELGLSVAEYSWFGSLSNVGAMVGAIASGQISEYIGRKGSLMIAAIPNIIGWLAISFAKDSSFLYMGRMLEGFGVGIISYTVPVYISEIAPQNLRGALGSVNQLSVTIGIMLSYMLGLFVPWRILAVLGILPCTILIPGLFFIPESPRWLAKMGMMEEFEVSLQVLRGFDTDISLEVNEIKRSVASSSKRTTIRFAELRQRRYWLPLMIGNGLLILQQLSGINGVLFYSSTIFKEAGVTSSNAATFGLGAVQVIATVVTTWLVDKSGRRLLLIVSSSGMTLSLLVVAMSFFLKEMVSDESTWYSVFSILSVVGVVAMVVTFSLGIGAIPWIIMSEILPINIKGLAGSIATLANWFVAWIVTMTANIMLSWNSGGTFSIYMVVCAFTVAFVVIWVPETKGRTLEEIQWSFRR

SEQ ID NO: 23862 - protein, 493 aa, Anopheles gambiae str. PEST
SVMVRIAWTDLKPFAPTVILVRSWCARMGKLPYYFAHQNQYIAALAASYGVLTIGMVFGWSAPAGPQILENGEGNLNLTDDQFSWTIAFMPIGGAIAAIPCGIMLKSEGRKNTILFFVLPLLLGWVLLTWAQAIVMMYLGRLLQGFAAGAYSMSVPIYIGEIADQRIRGTVGSFFQLMLNLGMLMSFSISAGVNVFQLNIISGFIVLLFGPIFMLMPETPSFLLKRGHKTKAVETLKWLRGPKCDAFYEIEQLQLEQDALLNQPKKSIKKSLFTPETLSALLAMIGLVTFLQMSGINAVLFYATDIFMNASDSLNHEVATIIVGAMQFFGTLLAAFTVDRVGRRWLLMISAIIMCVSHVVLGVYFHLLQNSPAQVENLEWLPVFALSLFVTMFSIGFGPVPWIMIGEVFAIDVKDLASSLATFTSYALSFMMTKTFNPLRNGLGEAGTFWLFGGFCMLGAIFVFLFVPETKGKTFDQIQKRLASSKVYFRAEN

SEQ ID NO: 23863 - protein, 431 aa, Anopheles gambiae str. PEST
GTLLMLSVAASYGWTSPTLPLLLSDDSPLPITPDESSWIVSILVLTSIAGPVATAWLIDGFGRKVTLLIAVLPSIVGWILIGVGESVTVLYISRALSGISYGMAYSSMPLYLGEIASDRIRGSIGTLLTVMAKSGILLEYVIGPYVDYRTLAWISVAFPTTFFALFLWLPESPYYLLAKQRNEQAEKNLRWLRRASDVQDELRMMQAAVERSQQNRGTFRDLLTRGNRRSLIIILGLGALQQLCGSQAVIAYSQQIFDQVNSGLKAHESSIIMAVIQLVTAALSSSIVDRVGRRPLLLISTVGCAVGTFIVGLYFFLLQQEVDVEGVGWIPLAVIMIYIVFYTVGLATVPFAILGEIFPTNVKAVAAAIYTMFAGSVGFGVSKLYQLISDEAGTYVSFWIFAACSAAFVVFVFALVPETKGKPLDQILIEM

SEQ ID NO: 23864 - protein, 529 aa, Anopheles gambiae str. PEST
YYTAFLFKMTGKDSVVLVDKDTVPQIMATGEKKGAMVTLATVESQPNKAAERGKAMRQVIAAFVANIGTINTGLIFGFSAVVIPQLQAADSLIPVDESQSSWVASLSAIGTPIGCLLSGYVMDNFGRKKALIATQIPTIIGWIVIACASNVGMIYAGRVLTGFGSGMVGAPARVYTSEVTQPHLRGMLCALASTGISLGVLIQYTLGAFTTWKFLSGVSIIVPVAALILMLLMPETPNYLVSKQKPEKARRSLARLRGSSYNIDREVEQLQSFAAKTNASGKKSLSLRETVQALVHPSCLKPFAILTIYFMMYQFSGVNTITFYAVEIFRDSGTTMDKNTCTILLGVVRLIFTIVGAILLRRCGRRPLTFISGIGCGFTMVGLGVYLYFKHQWDTAVPPIEPTATWFPVACIFIFITTCTVGFLVVPWVMIGELYPMKVRGLVGGFTTCMAHSFVFIVVKTYPFLTHVLERHGTFILYGCFSFVETKGKTLQEIEDYFSGRTKTLKKPKAGTNGQQNDENDGQQMLLAN

SEQ ID NO: 23865 - protein, 449 aa, Anopheles gambiae str. PEST
WSSPALPVLRGPNSPIPITPDEGSWVVSLLSIGSLFGPIICGLFVDRYGRKPVLLISAVPLVAGWLFIVFAESVGMLYTARLLHGIGYGLAYSLTPIYLGEISSNAVRGSTAVLVTVMAKLAFLFEYSVGPYVGFRALAWISLALPVGFVVLFFWMPETPYYLLARGNKKAAADSLRWLRRSSTIDEELGRMEKLVLESKQKGNPLKQLLLTSSNKKSLVIILLLSFGMQLTGINAILGYSQTIFSRLALPLTAAELSIVLALVQLGSVMLPTFLVDRAGRRPLLLASTAGSFIGLAVCAVYFTLDETTTDVLSPEPGAAHGWIPFVGVLLFIISFAIGLATVPFAILGEVFPKHIKAAANSVFAVITSAVVFSVVKLFQVISDGAGTYVSFWIFTGCTAMTGVLIYLIIPETKGQSFERIQEIMMRRGRSNETGRECGSGAKGRPLLC

SEQ ID NO: 23866 - protein, 449 aa, Agrobacterium tumefaciens str. C58 (U. Washington)
MQGRGDADPYRMARSCVKGRNMSTNYLSAASVRTKNPAGVIATCGLMIMFDGYDLVVYGAVAPALLKESTWALNPAMVGRAAALTLVGMLLGALFAGTMADRIGRRKVVLLSLAGFSAMMIASAMTPNFLAFEITRFFAGLGLGALLPTVTALVLEFSPPQRRAQANSLSFLGYLIGGIISGILGMLLLESYGWRPLMLIGGLPLILLPIFMRFLPESPEWLASKGRQAEADGICDSYGLQRIVPHAKMQKGGVGALFSEGRLASTLNAWGIHFCSLLLTFGMVNWLPTIMNKMGYDISSALSFSVMLNVGAAIGILIGGRFADKGNVKVVVAILFAVGAASIFALTANKGPLLYVFVALAGAGTIGTQILANVLVGRLYPVHIRGTGLGFSLAVGRLGGIAGPMIGGLVLQRGLAPEWNFYIFGSVAVVGLMLTVLTLLYRTSGDARV

SEQ ID NO: 23867 - protein, 477 aa, Agrobacterium tumefaciens str. C58 (Cereon)
MASDIGDVWLDRSKAHIRVEPAGHSRRIMQGRGDADPYRMARSCVKGRNMSTNYLSAASVRTKNPAGVIATCGLMIMFDGYDLVVYGAVAPALLKESTWALNPAMVGRAAALTLVGMLLGALFAGTMADRIGRRKVVLLSLAGFSAMMIASAMTPNFLAFEITRFFAGLGLGALLPTVTALVLEFSPPQRRAQANSLSFLGYLIGGIISGILGMLLLESYGWRPLMLIGGLPLILLPIFMRFLPESPEWLASKGRQAEADGICDSYGLQRIVPHAKMQKGGVGALFSEGRLASTLNAWGIHFCSLLLTFGMVNWLPTIMNKMGYDISSALSFSVMLNVGAAIGILIGGRFADKGNVKVVVAILFAVGAASIFALTANKGPLLYVFVALAGAGTIGTQILANVLVGRLYPVHIRGTGLGFSLAVGRLGGIAGPMIGGLVLQRGLAPEWNFYIFGSVAVVGLMLTVLTLLYRTSGDARV

SEQ ID NO: 23868 - protein, 487 aa, Shigella flexneri 2a str. 301
MSILFVPATGNKMMIKMRQVNLPQLLPFIANPRHPMEQYDQIGARLDRLPLARFHYRIFGIISFSLLLTGFLSYSGNVVLAKLVSNGWSNNFLYAAFTSALMFGYFIGSLTGGFIGDYFGRRRAFRINLLIVGIAATGAAFVPDMYWLIFFRFLMGTGMGALIMVGYASFTEFIPATVRGKWSARLSFVGNWSPMLSAAIGVVVIAFFSWRIMFLLGGIGILLAWFLSGKYFIESPRWLEGKGQIAGAESQLREVEQQIEREKSIRLPQLTLNQSNSKVKVIKGTFRLLFKGEMLRRTLVAITVLIAMNISLYTITVWIPTIFVNSGIDVDKSILMTAVIMIGAPVGIFIAALIIDHFPRRLFGSALLIIIAVLGYIYSSQTTEWAILIYGLVMIFFLYMYVCFASAVYIPELWPTHLRLRGSGFVNAVGRIVAVFTPYGVAALLTHYGSITVFMVLGVMLVLCALVLSIFGIETRKVSLEEISEVN

SEQ ID NO: 23869 - protein, 475 aa, Escherichia coli CFT073
MMIKMRQVNLPQLLPFLANPRHPMEQYDQIGARLDRLPLARFHYRIFGIISFSLLLTGFLSYSGNVVLAKLVSNGWSNNFLNAAFTSALMFGYFIGSLTGGFIGDYFGRRRAFRINLLIVGIAATGAAFVPDMHWLIFFRFLMGTGMGALIMVGYASFTEFIPATVRGKWSARLSFVGNWSPMLSAAIGVVVIAFFSWRIMFLLGGIGILLAWFLSGKYFIESPRWLAGKGQIAGAESQLREVEQQIEREKSIRLPPLTLNQSNSKVKVIKGTFWLLFKGEMLRRTLVAITVLIAMNISLYTITVWIPTIFVNSGIDVDKSILMTAVIMIGAPVGIFIAALIIDHFPRRLFGSALLIIIAVLGYIYSIQTTEWAILIYGLVMIFFLYMYVCFASAVYIPELWPTHLRLRGSGFVNAVGRIVAVFTPYGVAALLTHYGSITVFMVLGVMLVLCALVLSIFGIETRKVSLEEISEVN

SEQ ID NO: 23870 - protein, 469 aa, Streptomyces avermitilis MA-4680
MSQTTTAVSGVSAPVSIGVRLDRMPITPMHRRLTAVIGIGLLFDTFENSLSGTIAKVLQGDFAFGATSLKLVLASVFVGQFIGSLVLGRVADRFGRRRAFLINLAIYSGFSLLGAFSPNAGWLIATRFLAGIGIGAEQALSDCYLADVLPAAKRGRFIAWAYTLAFCGVPAVGFAALWLVPLTPLGVDGWRWLFVIGALGSAVVWVLRRQLIESPRWLAATGRTAEADRLVSRMEAQAPAGRTAEDLPAPYEAPGAARVRLRDVFAPGLRRRTVMLWIFCALSVVGYYGFGTLAPQILAAKGFDIVAGLGFTALCFLGYPVGSALSLPVIDRVERKTLVAASAAAMVAAGMGFAFTDSPALIVAFGFGYTLCSNVFSSVSHVYLSEQYPTAIRATASGAAYSLSKLSAAALPFVLLPVLDSYGPGALFAVIAAAMAALAVTVLTLGERTTGASVDRAPVPVNIPTLKRS

SEQ ID NO: 23871 - protein, 482 aa, Arabidopsis thaliana
MAIREIKDVERGEIVNKVEDLGKPFLTHEDDEKESENNESYLMVLFSTFVAVCGSFEFGSCVGYSAPTQSSIRQDLNLSLAEFSMFGSILTIGAMLGAVMSGKISDFSGRKGAMRTSACFCITGWLAVFFTKGALLLDVGRFFTGYGIGVFSYVVPVYIAEISPKNLRGGLTTLNQLMIVIGSSVSFLIGSLISWKTLALTGLAPCIVLLFGLCFIPESPRWLAKAGHEKEFRVALQKLRGKDADITNEADGIQVSIQALEILPKARIQDLVSKKYGRSVIIGVSLMVFQQFVGINGIGFYASETFVKAGFTSGKLGTIAIACVQVPITVLGTILIDKSGRRPLIMISAGGIFLGCILTGTSFLLKGQSLLLEWVPSLAVGGVLIYVAAFSIGMGPVPWVIMSEIFPINVKGIAGSLVVLVNWSGAWAVSYTFNFLMSWSSPGTFYLYSAFAAATIIFVAKMVPETKGKTLEEIQACIRRET

SEQ ID NO: 23872 - protein, 482 aa, Arabidopsis thaliana
MAIREIKDVERGEIVNKVEDLGKPFLTHEDDEKESENNESYLMVLFSTFVAVCGSFEFGSCVGYSAPTQSSIRQDLNLSLAEFSMFGSILTIGAMLGAVMSGKISDFSGRKGAMRTSACFCITGWLAVFFTKGALLLDVGRFFTGYGIGVFSYVVPVYIAEISPKNLRGGLTTLNQLMIVIGSSVSFLIGSLISWKTLALTVLAPCIVLLFGLCFIPESPRWLAKAGHEKEFRVALQKLRGKDADITNEADGIQVSIQALEILPKARIQDLVSKKYGRSVIIGVSLMVFQQFVGINGIGFYASETFVKAGFTSGKLGTIAIACVQVPITVLGTILIDKSGRRPLIMISAGGIFLGCILTGTSFLLKGQSLLLEWVPSLAVGGVLIYVAAFSIGMGPVPWVIMSEIFPINVKGIAGSLVVLVNWSGAWAVSYTFNFLMSWSSPGTFYLYSAFAAATIIFVAKMVPETKGKTLEEIQACIRRET

SEQ ID NO: 23873 - protein, 501 aa, Oryza sativa (japonica cultivar-group)
MSFRGEESGGEDGGRTASASDLRKPFLHTGSWYKMSSAGGGGGMGSRLGSSAYSLRDSSVSAVLCTLIVALGPIQFGFTCGFSSPTQDAIISDLGLTLSEFSLFGSLSNVGAMVGAIASGQIAEYIGRKGSLMIAAIPNIIGWLAISFAKDSSFLFMGRLLEGFGVGVISYVVPVYIAEIAPQTMRGALGSVNQLSVTIGILLAYLLGMFVPWRILSVLGILPCSILIPGLFFIPESPRWLAKMGKMEDFESSLQVLRGFETDIAVEVNEIKRSVQSSRRRTTIRFADIKQKRYSVPLMVGIGLLVLQQLSGVNGILFYAASIFKAAGLTNSNLATFGLGVVQVVATGVTTWLTDKAGRRLLLIISTTGMTITLVVVSVSFFVKDNITNGSHLYSVMSMLSLVGLVAFVISFSLGLGAIPWIIMSEILPVNIKSLAGSVATLANWLTAWLITMTASLMLSWSNGGTFAIYAAVCAGTLVFVCLWVPETKGRTLEEIAFSFR

SEQ ID NO: 23874 - protein, 447 aa, Oryza sativa
  unsure (1)..(447): unsure at all Xaa locations
RXGEKEGEEHRSMSMLMLSTAVAVCGSFEFGTCVGYSAPTQSGIVDEVGLSISQFALFGSVLTIGAMIGAVTSGRLADFLGRKMTMRISATICIFGWLSLHLAKGVIMLYFGRILLGFSTGILSYVVPVFIAEIAPKNLRGGLATSNQLLICSGSSATYIIGALVAWRNLVLVGIVPCVLLLTGLLFIPESPRWLANVGREKEFHASLQMLRGEDADVSEEAVEIKVYIESLHRFPKARVQDLFLRKNIYAVTVGVGLMIFQQLGGINGVGFYASSIFTSAGTFSGKLGTILIGIIQIPITLFGAILMDKSGRRVLLMVSASGTFLGCFLTGISFYLKAQGLFSEWVPELALTGILVYIGAYSIGMGPVPWVVMSEAIGGSLVTLVSWLGSFAISYSFSFLMDWSSAGTFFMFSAASLITILFVVMVVPETKGRTLEEIQDSLIDSR

SEQ ID NO: 23875 - protein, 466 aa, Oryza sativa
  unsure (1)..(466): unsure at all Xaa locations
XPPPPNGKVNPVCTPCPLRKXKEKKTQXNGSLWMVFLATAVAVCGSFEFGTCVGYSAPAQAGIVNDFGLSNSEYGVFGSVLTIGAMIGALTSGRLADSLGRKTTMGLAAIIGIVGWFTIYFANGATMLYLGRVLLGYCTGVLSYVVPVFISEIAPKDLRGGLASSNQLFICSGCSAAYIIGALLSWRSLVLVGLVPCAFLLVGLLFIPESPRWLANTGRVKEFNASLQKLRGENADISEEAAGIREYIESLRSLPEARVQDLFQRKNLFAVIVGVGLMVFQQLGGINALGFYTSYIFSSAGRFSGKLGTTLIGIFQIPLTLFGALLMDRSGRRALLLVSASGTFLGCFLTGLSFYFKAQGVYAQLVPTLALYGISVYYAAYSVGMGPVPWVIMSEAIAGSLVTLVSWIGSFAISYSFNFLMDWNSAGTFFLFSAASLVTVLFVARLVPETKGKALEEIQESFTXQL

SEQ ID NO: 23876 - protein, 398 aa, Oryza sativa
  unsure (1)..(398): unsure at all Xaa locations
PPPPQTVRXTLFLATAVAVCGSFEFGTCVGYSAPAQAGIVNDFGLSNSEYGVFGSVLTIGAMIGALTSGRLADSLGRKTTMGLAAIIGIVGWFTIYFANGATMLYLGRVLLGYCTGVLSYVVPVFISEIAPKDLRGGLASSNQLFICSGCSAAYIIGALLSWRSLVLVGLVPCAFLLVGLLFIPESPRWLEVLCLITWQANTGRVKEFNASLQKLRGENADISEEAAGIREYIESLRSLPEARVQDLFQRKNLFAVIVGVGLMVFQQLGGINALGFYTSYIFSSAGFSGKLGTTLIGIFQVYYAAYSVGMGPVPWVIMSEIFSIEIKAIAGSLVTLVSWIGSFAISYSFNFLMDWNSAGTFFLFSAASLVTVLFVARLVPETKGKALEEIQESFTXQL

SEQ ID NO: 23877 - protein, 324 aa, Triticum aestivum
  unsure (1)..(324): unsure at all Xaa locations
AEIAPQNMRGALGSVNQLSVTIGILLAYTLGMFVPWRILSVLGILPCSILIPGLFFIPESPRWLAKMGKMEDFESSLQVLRGFETDISAEVNEIKRSVASSRRRTTATLANWRHKSSSVPLMIGIXLLILQQLSGVKGIFFYAASIFKAAGLKKSNLATCGLGAVHVVATGITTWLTDKAGRRLLLIISATGMTISLLVVSVSFFVKDNIDEASHLHFVMSMLSLAGLVAFVLAFSLGMGAIPWIIMSEILPVNIKSLAGSTATLANWMTSWLITMTASLMLNWSNGGTFAIYAAVSMGTLLFVCLCVPETKGRTLEEIAFSFR

SEQ ID NO: 23878 - protein, 208 aa, Triticum aestivum
  unsure (1)..(208): unsure at all Xaa locations
MGKPRASGDVESRALASGSGGATAPLLHRNDRKEDAKTQGGSLSMVLFSTAVAVCGSFEFGTCVGYSAPTQLGIEHELGLSIAEFAIFGSVLTIGAMIGAVTSGRLADSLGRKMTMRIAATICIFGWLSIHFAKGATMLYFGRTLLGFCTGVLSYVVPVFIAEIAPKDLRGGLATXNQLLIVCGSSSTYIIGALVTWRNLVFVGIVPX

SEQ ID NO: 23879 - protein, 288 aa, Triticum aestivum
  unsure (1)..(288): unsure at all Xaa locations
XLLAVLGTLPCTLLIPGLFFIPESPRWLAKMNLMDDFETSLQVLRGFETDITAEMNDIKRAVESANKKATVRFQELNQKKYRTPLLIGTGLLVLQNLCGINGILFYASRIFRAAGFTNSDLATCALGAIQVLATGVTTSLLDKAGRRMLLIISTAGTTLSLLAVSVAFFLKDNLPHDSHSDYILSMVSLVALVAYIITFSFGMGAIPWLIMSEILPVGIKSFAGSFATLANMLTSFGVTMTANLLLSWSAGGTFASYMVVSAFALVFVILWVPETKGRTLEEIQWSFR

SEQ ID NO: 23880 - protein, 281 aa, Triticum aestivum
  unsure (1)..(281): unsure at all Xaa locations
MAAGASISPPSPTRRRRQSXRSRRRTPEAATPRSALLPPSVSSSGFASDVRRTHVXTSRRRRASRRLQKRTLLQPGPMSTEWEGVEAKNRNSSVSSIWVVVASTTVAVAGSFVFGISVGYSSPSQKGIMRDLHLSLAEYSVFGSILTIGAMLGAIVSGTIADRVGRRCAMAISDVFCILGYLLIAFSKNSVWLDLGRLSIGCGIGLLSYVVPVYISEITPKNLRGRFAAVNQFMICCGASLAYALGTCITWRTLAIXVGVTPCLLQLAGLLVIPESPRGLX

SEQ ID NO: 23881 - protein, 337 aa, Triticum aestivum
  unsure (1)..(337): unsure at all Xaa locations
AASLSPPPLYLPSARAAMNGKGGDGGSDHDDMDMRKPLLVNTGSWYKMGSSLTAGSSSMAIICESHVSALLCTLIVALGPIQFGFTGGFSSPTQDAITRDLGLSISEFSVFGSLSNIGAMVGAIASGQMVEHVGDKGALMIAAVPNILGLGSRSLAKDTTSLYTGRLCWYHIVHVTCITRRDYTSEISPRSRRGALXGCVNPLSVTLGMVLAYVLGMLVPWRMLALIGTLPCTILIPGLLFIPESPRWLAKMNKMDDFEASLQVLRGSETDITSEVNDIKTAVASANKMTAIRFQELNQKKFRMPLILGIGLLVLQQLSGINAILFYAGSIFKAAGX

SEQ ID NO: 23882 - protein, 488 aa, Saccharomyces cerevisiae
MAETERLMPNGGSRETKPLITGHLILGTIVACLGSIQYGYHIAELNAPQEFLSCSRFEAPDENISYDDTWVGQHGLKQCIALTDSQYGAITSIFSIGGLFGSYYAGNWANRYGRKYVSMGASAMCMVSSLLLFFSNSYLQLLFGRFLVGMSCGTAIVITPLFINEIAPVEWRGAMGSMNQVSINLGILLTQTLALKYADSYNWRWLLFSGSVIAVANILAWLKVDESPRWLVSHGFVSEAETALFKLRPGTYQQAKQEIQDWQRSHGHNRDPESSEETHSGPTLWQYVTDPSYKKPRTVILAILSCQQFCGINSIIFYGVKVIGKILPDYSIQVNFAISILNVVVTLAASAIIDHVGRRPLLLASTTVMTAMSLLISVGLTLSVSFLLVTATFVYIAAFAIGLGPIPFLIIGELSYPQDAATAQSFGTVCNWLATFIVGYLFPIGHGLMGGYVFAIFAAIAAMFATYVYKRVPETKGKTTYSEVWAGY

SEQ ID NO: 23883 - protein, 446 aa, Desulfitobacterium hafniense
MGKISISDVVDQIGVSKYTYKTYFLVGLTLIFCGFSYMIVSYTMPQMSAEWGLTKVQTGSLASWSLLGLMVGGMIAGIISDSIGRKKGLAIFTIWFSLLTFPIYFVNSFEAFAILRILGGVGFGACIPIAITLMAENVPTKNRGFFISSIMSFYVLGWVVAGVVAIYVVPTFGWRVCYLIGVLPVLYAFVLMAALQESPHWLLGKGREKEAIEVLKRIEMVSKGKANDYAPGSLFLPPRPKKVGVGALFSREYSRATMALWIIYFMGSVVIYGINGWLPTLLVDKGYGLVKGYSFAVLQNVFGAIGGLCTGYVADIIGRRTNVIIGWIATAVAILLLGVASNQWMVVICGMLVGLAMNWGLSGTQPLLAEGYPTEFRSTGVASAQAFGRVGGFLGPIVAGYVQQLGVGFTGTFVFFAVPAVIASFVALFFVVETKGKSIERISANA

SEQ ID NO: 23884 - protein, 516 aa, Caenorhabditis elegans
MNAVVASQNKNDRSFSNMESESSSNVEKSEKENHHQSLPDENWTPFLFFCISSIALASFQDGFQIGCINAPGPLIIDWIKKCHFELFGEVLSQYQADFIWSVAVSMFSVGGMFGSFCSGFLADKFGRKSTLLYNNILALLAAVCLSTSKLFNFYPMIVFGRFLVGLNCGITSGLVPMFLTELAPANLRGKCGSFHQLNISVAIVLSQALGLPQIFGTQVGWPYIFACVAIPTFLQLATIPFCVESPKYLISKLNDREEARRILEKLRGHTKVDEELEHMVQETMVTVEPLHQPGYVSLFKGDNQWPMIVSILMMFSQQFSGISAVTFYSTLIFKRNGLSGNEPMYATVGFGCIKLIATFGCLFLIDHPKFGRKRLHIAGLSGMCISSILIVITLTLSNAGYHWASYMNVLFILSFVVTFAFGPGPIPWFFTSELFDSATRGRAAAVSATSNWVANWMVGLTFLPINNIIHQYAFLMFTFFTFTFAIFTWKFVPETKGKSPSAIRKELAFMRKRICS

SEQ ID NO: 23885 - protein, 576 aa, Caenorhabditis elegans
MNAVVASQNKNDRSFSNMESESSSNVEKSEKENHHQSLPDENWTPFLFFCISSIALASFQDGFQIGCINAPGPLIIDWIKKCHFELFGEVLSQYQADFIWSVAVSMFSVGGMFGSFCSGFLADKFGRKSTLLYNNILALLAAVCLSTSKLFNFYPMIVFGRFLVGLNCGITSGLVPMFLTELAPANLRGKCGSFHQLNISVAIVLSQALGLPQIFGTQVGWPYIFACVAIPTFLQLATIPFCVESPKYLISKLNDREEARRILEKLRGHTKVDEELEHMVQETMVTVEPLHQPGYVSLFKGDNQWPMIVSILMMFSQQFSGISAVTFYSTLIFKRNGLSGNEPMYATVGFGCIKLIATFGCLFLIDHPKFGRKRLHIAGLSGMCISSILIVITLTLSNAGYHWASYMNVLFILSFVVTFAFGPGPIPWFFTSELFDSATRGRAAAVSATSNWVANWMVGLTFLPINNIIHQYAFLMFTFFTFTFAIFTWKFVPETKGKSPSAIRKDLQNASFDYSSPSRPSRTFFSPIWIWVQLWLRSTNVSWIWWIWWRTSRASYWKEVGRREELFADFLYLIVI

SEQ ID NO: 23886 - protein, 465 aa, Drosophila melanogaster
MSKGSVLPQYIAGLSASFGALCMGASIGWSSPVENMITVNTEYGFPISSSQFGWVSSLLTLGATVICIPIGFAIDWIGRRPTMLALIPPYMVGWVLMLFAKNVTMLYFGRFILGMCGGAFCVTAPMYCTEITATALRGTIGSFFQLLIVSGVLYGYLVGAFLPLLTINILCAILPVIFAIIHFFMPESPVYLAMKGRNDDAAKALQWLRGKDADIDDELKEILEESQKQIDMPQVNILSSLRRPIVLKGLGIAVLLQVFQQWTGINAVLFYSASIFEDTGSDISGSDATLIIGVTQVTSTLVAVAIIDKAGRRILLLISGVLMAVSTALMGVYFQLKENDPASMDNFGWLPISSICIFIIFFSIGFGPVPWLVMAELFSEDVKSVAGSIAGTSNWLSAFVVTLLFPILKSSIGPGPTFWIFTAIAVIAFFYSLFFVPETKGKTIIEIQDLLSGGKGVKSDDKSQT

SEQ ID NO: 23887 - protein, 489 aa, Drosophila melanogaster
MKILMRADTHVSFSVPVEEPKAICTFSQVLAALSVSLGSLVVGFVSAYTSPALVSMTDRNITSFEVTQDAGSWVGGIMPLAGLAGGIAGGPLIEYLGRRNTILATAVPFIVSSLLIACAVNVAMVLCGRFLAGFCVGIASLSLPVYLGETVQPEVRGTLGLLPTAFGNIGILLCFVAGSFMNWSMLAFLGAALPVPFLILMFLIPETPRWFVGRGLEERARKALKWLRGKEADVEPELKGLMRSQADADRQASRNTMLELLKLNNLKPLSISLGLMFFQQFSGINAVIFYTVQIFKDAGSTIDGNLCTIIVGIVNFLATFIGIVLIDRAGRKILLYVSDIAMVLTLFVLGGFFYCKTYGPDVSHLGWLPLTCFVIYILGFSLGFGPIPWLMMGEILPAKIRGSAASVATAFNWFCTFVVTKTFQDLTVAMGAHGAFWLFGAICFVGLFFVIIYVPETQGKTLEDIERKMMGRVRRMSSVANIKPLSFNM

SEQ ID NO: 23888 - protein, 857 aa, Drosophila melanogaster
MSGRDNRGAGGGGGGHQPLSNAMGKLKEKLTRVGDELGYHRVESNLSTSNTATSLDTILPEDPFLFPQVSPQRHPQNTVRTQRLLEDEPPLSFRPLLEDDDINEPPTQQQQRTPLRASGSLELTPLPPPPTSLEIREHRDRQQRGAQGDELQRSKQSLKGSRVSFERRDTGNSNTNSNKAAESSDEDSFEEKRTGFQQQKATSVDHKGILKDLKHILANDNRRQFQAKKHVSLDVKGTRFLQDLLKESSSEEEFHKTRREFQGRKHQSLDPRVTFKLDKVLQGSSTDSDEEGEDAEHKRLIHRPKDITKPVIIDLKDLESESDEDFLTSRQHFQQQRSISTDSRKSRRLYEMDEMDNKRGENIRHAVPFVRQITEDGKPKLEVYRPTTNPIYIWTQVLAALSVSLGSLVVGFVSAYTSPALVSMTDRNITSFEVTQDAGSWVGGIMPLAGLAGGIAGGPLIEYLGRRNTILATAVPFIVSSLLIACAVNVAMVLCGRFLAGFCVGIASLSLPVYLGETVQPEVRGTLGLLPTAFGNIGILLCFVAGSFMNWSMLAFLGAALPVPFLILMFLIPETPRWFVGRGLEERARKALKWLRGKEADVEPELKGLMRSQADADRQASRNTMLELLKLNNLKPLSISLGLMFFQQFSGINAVIFYTVQIFKDAGSTIDGNLCTIIVGIVNFLATFIGIVLIDRAGRKILLYVSDIAMVLTLFVLGGFFYCKTYGPDVSHLGWLPLTCFVIYILGFSLGFGPIPWLMMGEILPAKIRGSAASVATAFNWFCTFVVTKTFQDLTVAMGAHGAFWLFGAICFVGLFFVIIYVPETQGKTLEDIERKMMGRVRRMSSVANIKPLSFNM

SEQ ID NO: 23889 - protein, 506 aa, Drosophila melanogaster
MDEMDNKRGENIRHAVPFVRQITEDGKPKLEVYRPTTNPIYIWTQVLAALSVSLGSLVVGFVSAYTSPALVSMTDRNITSFEVTQDAGSWVGGIMPLAGLAGGIAGGPLIEYLGRRNTILATAVPFIVSSLLIACAVNVAMVLCGRFLAGFCVGIASLSLPVYLGETVQPEVRGTLGLLPTAFGNIGILLCFVAGSFMNWSMLAFLGAALPVPFLILMFLIPETPRWFVGRGLEERARKALKWLRGKEADVEPELKGLMRSQADADRQASRNTMLELLKLNNLKPLSISLGLMFFQQFSGINAVIFYTVQIFKDAGSTIDGNLCTVIVGIVNFLATFIGIVLIDRAGRKILLYVSDIAMVLTLFVLGGFFYCKTYGPDVSHLGWLPLTCFVIYILGFSLGFGPIPWLMMGEILPAKIRGSAASVATAFNWFCTFVVTKTFQDLTVAMGAHGAFWLFGAICFVGLFFVIIYVPETQGKTLEDIERKMMGRVRRMSSVANIKPLSFNM

SEQ ID NO: 23890 - protein, 444 aa, Drosophila melanogaster
MGTATQFIVGFIGALGAFCLGAVIGWSGPVENEVKNSNAYNFTPRQTEWGLVGSLMTLGAAFSCIPVGVLIGKIGRKTTMLILLPPFFIGWLLILLASHIAMLLLGRFVVGFCGGAFCVTCPMYVTEIAQVQYRGTMGCFFQLLIVFGILYAFVVGGFVKTFYFNIACAILPVIFFVLMIFMPESPIFLAQKGKAEKAEKSLKFLRGKDADVSGELKEMSAEGQKEKASVGKILCRRITLKGLFLSIGLMLFQQMTGINAIIFYSTFIFETAGSTLEPRISTIIVGIVQAIATIISILVIEKVGRKILLLVSACMMGISTLIMALYFGMLMKSGVGWLALIAVCVFIIGFSLGFGPVPWLMMAELFAEDVKALAGSIAGTTNWCFAFIVTLLFPVLNDIIGATACFAIFFGFAVAAFVFILFLIPETKGKTLNEIQAKMGEKAE

SEQ ID NO: 23891 - protein, 471 aa, Drosophila melanogaster
MVHTSTSNNSQKWPQYVAALAAAGGAFAAGTVLGWTSPAETEIVDRGEGYDFPVDKDQFSWVGSAMTLGAACVCIPIGFLINMIGRKWTMLFLVLPFILGWTMLIWAVNVSMLYASRFILGIAGGAFCVTAPMYTGEIAQKEIRGTLGSFFQLMITIGILFVYAVGAGVKIFWLSIICGILPLIFGAIFFFMPESPTYLVSKDRSENAIKSIQWLRGKEYDYEPELAELRETDRETKANKVNVWAALNRPVTRKALAISMGLMFFQQVCGINAVIFYASRIFLEANTGIEAEWATILIGIMQVVATFVSTLVVDKLGRRILLLASGISMAISTTAIGVYFFLQKQDAAQVVSLGWLPVASLCLFIIMFSIGYGPVPWLMMGELFATDIKGFAGSLAGTSNWLLAFVVTKTFVNLNDGLGIGGTFWLFAGLTVVGVIFVYFAVPETKGKSLNEIQQELAGNRSTPQAIPAEK

SEQ ID NO: 23892 - protein, 539 aa, Drosophila melanogaster
MSTASSSNSSGEEANKKSGSNNEESSHLLESAENGAKYGSRQPVKIVKASDNGRTSSTPHDQENLLGNMVHTSTSNNSQKWPQYVAALAAAGGAFAAGTVLGWTSPAETEIVDRGEGYDFPVDKDQFSWVGSAMTLGAACVCIPIGFLINMIGRKWTMLFLVLPFILGWTMLIWAVNVSMLYASRFILGIAGGAFCVTAPMYTGEIAQKEIRGTLGSFFQLMITIGILFVYAVGAGVKIFWLSIICGILPLIFGAIFFFMPESPTYLVSKDRSENAIKSIQWLRGKEYDYEPELAELRETDRETKANKVNVWAALNRPVTRKALAISMGLMFFQQVCGINAVIFYASRIFLEANTGIEAEWATILIGIMQVVATFVSTLVVDKLGRRILLLASGISMAISTTAIGVYFFLQKQDAAQVVSLGWLPVASLCLFIIMFSIGYGPVPWLMMGELFATDIKGFAGSLAGTSNWLLAFVVTKTFVNLNDGLGIGGTFWLFAGLTVVGVIFVYFAVPETKGKSLNEIQQELAGNRSTPQAIPAEK

SEQ ID NO: 23893 - protein, 496 aa, Drosophila melanogaster
MVATEELKTTVSQEDGDSRNPITYDLLQENQSKTSKTRQYVAAMIICLGAVAAGTALSWTSPVFPQISAGNESSFNSTTGGISNSTSNENDIRLTDSQKTLVGSMLPFGALFGALPSGYIADRIGRRYTAMVMDIPFILAWITLSFANSVGWLYLGRFLIGIATGSFCVVAPMYISEIAETSIRGSLGTLFQLLLTIGILFIYVVGALVSWKTLSLLCLIIPILLLVGLFIVPETPVYLLKNGKRSEANRALKWLWGDYCNTSNAIQAIQNDLDQTGVDASVKDLFSNRASRNGMVISVLLMVFQQFSGINAVIFFMNEIFESSSTLNPNVCTIVVGVVQVIMTLASSLLIEKAGRKILLIFSSTIMTVCLAMLGAYNTINRHTDLSQSIGWLPLLCIVLFIVSFSVGYGPIPWMMMGELFMPDVKGIAVSLSVMMNWVCVSLVTWLFGVLNAGGADVPFWFFSAWMGVATAYVAIALQETKGKSASQIQSWLSGR

SEQ ID NO: 23894 - protein, 724 aa, Discopyge ommata
MDDAYRNRTTLMKGAKDIAKEVKKQTIKKGTVGAEYTQDRYSKTAYANFQDDDCYNYSRGTYGEEQQEDEGSSDATEGHDEEDEIYEGEYQGIPDMSQKKESQVAIGQLVSDEYKDREELDAERRADEEELAQQYELIIQECGHGRFQWALFLVLGLSLMADGVEVFVVGFVLPSAETDMCVENSNSGWLGSIVYLGMMLGAFFWGGLADKMGRRQTLIICMSINGFFAFLSSFVQGYSLFLFCRFFAGFGIGGAVPVVFAYFAEVLAREKRGEHLSWLCMFWMIGGIYASAMAWAIIPHYGWSFSMGSAYQFHSWRVFVVVCALPCMSSVVALTFMPESPRYLLEVGKHDEAWMILKQIHDTNMRARGQPEKVFTVNRIKTPKLIDELIEIQTDTGTWYMRWFVRIKTEMYGIWLTFMRCLDYPVKRNTILLIIVWTTLSFGYYGLSVWFPDVIKHLQADEYASRVKRFYGEKVEDFVFNFTLENQIHTNGEYIRDRFTIMKFKAVTFEDSLFKNCYFEDITSLSTYFKNCTFTETLFYNTDLEEFKFIDCQFINSTFLHNKKGCQINFDEDYSAYWIYFVNFLGTLAVLPGNIVSALLMDRIGRLTMLGGSMVLSGISCFFLWFGTSEAMMIGMLCLYNGLTISAWNSLDVITVELLPTDRRATGFGFLNALCKAATVLGNLIFGSLVGITKSIPIMLASTVLVCGGLVGLRLPDTRNQVLM

SEQ ID NO: 23895 - protein, 452 aa, Escherichia coli K12
MEQYDQIGARLDRLPLARFHYRIFGIISFSLLLTGFLSYSGNVVLAKLVSNGWSNNFLNAAFTSALMFGYFIGSLTGGFIGDYFGRRRAFRINLLIVGIAATGAAFVPDMYWLIFFRFLMGTGMGALIMVGYASFTEFIPATVRGKWSARLSFVGNWSPMLSAAIGVVVIAFFSWRIMFLLGGIGILLAWFLSGKYFIESPRWLAGKGQIAGAECQLREVEQQIEREKSIRLPPLTSYQSNSKVKVIKGTFWLLFKGEMLRRTLVAITVLIAMNISLYTITVWIPTIFVNSGIDVDKSILMTAVIMIGAPVGIFIAALIIDHFPRRLFGSTLLIIIAVLGYIYSIQTTEWAILIYGLVMIFFLYMYVCFASAVYIPELWPTHLRLRGSGFVNAVGRIVAVFTPYGVAALLTHYGSITVFMVLGVMLLLCALVLSIFGIETRKVSLEEISEVN

SEQ ID NO: 23896 - protein, 507 aa, Homo sapiens
MQEPLLGAEGPDYDTFPEKPPPSPGDRARVGTLQNKRVFLATFAAVLGNFSFGYALVYTSPVIPALERSLDPDLHLTKSQASWFGSVFTLGAAAGGLSAMILNDLLGRKLSIMFSAVPSAAGYALMAGAHGLWMLLLGRTLTGFAGGLTAACIPVYVSEIAPPGVRGALGATPQLMAVFGSLSLYALGLLLPWRWLAVAGEAPVLIMILLLSFMPNSPRFLLSRGRDEEALRALAWLRGTDVDVHWEFEQIQDNVRRQSSRVSWAEARAPHVCRPITVALLMRLLQQLTGITPILVYLQSIFDSTAVLLPPKDDAAIVGAVRLLSVLIAALTMDLAGRKVLLFVSAAIMFAANLTLGLYIHFGPRPLSPNSTAGLESESWGDLAQPLAAPAGYLTLVPLLATMLFIMGYAVGWGPITWLLMSEVLPLRARGVASGLCVLASWLTAFVLTKSFLPVVSTFGLQVPFFFFAAICLVSLVFTGCCVPETKGRSLEQIESFFRTGRRSFLR

SEQ ID NO: 23897 - protein, 507 aa, Homo sapiens
MQEPLLGAEGPDYDTFPEKPPPSPGDRARVGTLQNKRVFLATFAAVLGNFSFGYALVYTSPVIPALERSLDPDLHLTKSQASWFGSVFTLGAAAGGLSAMILNDLLGRKLSIMFSAVPSAAGYALMAGAHGLWMLLLGRTLTGFAGGLTAACIPVYVSEIAPPGVRGALGATPQLMAVFGSLSLYALGLLLPWRWLAVAGEAPVLIMILLLSFMPNSPRFLLSRGRDEEALRALAWLRGTDVDVHWEFEQIQDNVRRQSSRVSWAEARAPHVCRPITVALLMRLLQQLTGITPILVYLQSIFDSTAVLLPPKDDAAIVGAVRLLSVLIAALTMDLAGRKVLLFVSAAIMFAANLTLGLYIHFGPRPLSPNSTAGLESESWGDLAQPLAAPAGYLTLVPLLATMLFIMGYAVGWGPITWLLMSEVLPLRARGVASGLCVLASWLTAFVLTKSFLPVVSTFGLQVPFFFFAAICLVSLVFTGCCVPETKGRSLEQIESFFRMGRRSFLR

SEQ ID NO: 23898 - protein, 445 aa, Homo sapiens
MQEPLLGAEGPDYDTFPEKPPPSPGDRARVGTLQNKRVFLATFAAVLGNFSFGYALVYTSPVIPALERSLDPDLHLTKSQASWFGSVFTLGAAAGGLSAMILNDLLGRKLSIMFSAVPSAAGYALMAGAHGLWMLLLGRTLTGFAGGLTAACIPVYVSEIAPPGVRGALGATPQLMAVFGSLSLYALGLLLPWRWLAVAGEAPVLIMILLLSFMPNSPRFLLSRGRDEEALRALAWLRGTDVDVHWEFEQIQDNVRRQSSRVSWAEARAPHVCRPITVALLMRLLQQLTGITPILVYLQSIFDSTAVLLPPKDDAAIVGAVRLLSVLIAALTMDLAGRKVLLFVSGYAVGWGPITWLLMSEVLPLRARGVASGLCVLASWLTAFVLTKSFLPVVSTFGLQVPFFFFAAICLVSLVFTGCCVPETKGRSLEQIESFFRTGRRSFLR

SEQ ID NO: 23899 - protein, 524 aa, Homo sapiens
MTEDKVTGTLVFTVITAVLGSFQFGYDIGVINAPQQVIISHYRHVLGVPLDDRKAINNYVINSTDELPTISYSMNPKPTPWAEEETVAAAQLITMLWSLSVSSFAVGGMTASFFGGWLGDTLGRIKAMLVANILSLVGALLMGFSKLGPSHILIIAGRSISGLYCGLISGLVPMYIGEIAPTALRGALGTFHQLAIVTGILISQIIGLEFILGNYDLWHILLGLSGVRAILQSLLLFFCPESPRYLYIKLDEEVKAKQSLKRLRGYDDVTKDINEMRKEREEASSEQKVSIIQLFTNSSYRQPILVALMLHVAQQFSGINGIFYYSTSIFQTAGISKPVYATIGVGAVNMVFTAVSVFLVEKAGRRSLFLIGMSGMFVCAIFMSVGLVLLNKFSWMSYVSMIAIFLFVSFFEIGPGPIPWFMVAEFFSQGPRPAALAIAAFSNWTCNFIVALCFQYIADFCGPYVFFLFAGVLLAFTLFTFFKVPETKGKSFEEIAAEFQKKSGSAHRPKAAVEMKFLGATETV

SEQ ID NO: 23900 - protein, 334 aa, Bos taurus
ISEIAYPEVRGLLGSCVQLMVVTGILLAYLAGWVLEWRWLAVLGCVAPSFMLLLMCFMPETPRFLLSQHKHQEAMAAMQFLWGYAQGWEEPPLGAQHQDFHVAQLRRPGVYKPFIIGISLMAFQQLSGVNAVMFYAETIFEEAKFKDSSLASVVVGVIQVLFTATAALIMDRAGRRLLLTLSGVVMVFSTSAFGTYFKLTEGGPSNSSHVDLPALVSMEAADTNVGLAWLAVGNMCLFIAGFAVGWGPIPWLLMSEIFPLHVKGVATGVCVLTNWFMAFLVTKEFSSLMEVLRPYGAFWLASAFCIFGVLFTLACVPETKGKTLEQITAHFEGR

SEQ ID NO: 23901 - protein, 530 aa, Mus musculus
MSGSNGPTDTHTYQSLAEDCLFGSVEQPKRSTGRLVMHSMAMFGREFCYAVEAAYVTPGLLSVGLPKSLYSMVWLLSPILGFLLQPVVGSASDHCRARWGRRRPYILTLAIMMLLGMALYLNGDAVVSALVANPRQKLIWAISITMVGVVLFDFSADFIDGPIKAYLFDVCSHQDKEKGLHYHALFTGFGGALGYILGAIDWVHLDLGRLLGTEFQVMFFFSALVLILCFITHLCSIPEAPLRDAATDPPSQQDPQGSSLSASGMHEYGSIEKVKNGGADTEQPVQEWKNQKPSGQSQRTMSMKSLLRALVNMPSHYRCLCVSHLIGWTAFLSNMLFFTDFMGQIVYHGDPYGAHNSTEFLIYERGVEVGCWGLCINSVFSSVYSYFQKAMVSYIGLKGLYFMGYLLFGLGTGFIGLFPNVYSTLVLCSMFGVMSSTLYTVPFNLIAEYHREEEKEKGQEAPGGPDNQGRGQGVDCAALTCMVQLAQILVGGGLGFLVNMAGSVVVVVITASAVSLIGCCFVALFVRYVD

SEQ ID NO: 23902 - protein, 530 aa, Mus musculus
MSGSNGPTDTHTYQSLAEDCPFGSVEQPKRSTGRLVMHSMAMFGREFCYAVEAAYVTPVLLSVGLPKSLYSMVWLLSPILGFLLQPVVGSASDHCRARWGRRRPYILTLAIMMLLGMALYLNGDAVVSALVANPRQKLIWAISITMVGVVLFDFSADFIDGPIKAYLFDVCSHQDKEKGLHYHALFTGFGGALGYILGAIDWVHLDLGRLLGTEFQVMFFFSALVLILCFITHLCSIPEAPLRDAATDPPSQQDPQGSSLSASGMHEYGSIEKVKNGGADTEQPVQEWKNKKPSGQSQRTMSMKSLLRALVNMPSHYRCLCVSHLIGWTAFLSNMLFFTDFMGQIVYHGDPYGAHNSTEFLIYERGVEVGCWGLCINSVFSSVYSYFQKAMVSYIGLKGLYFMGYLLFGLGTGFIGLFPNVYSTLVLCSMFGVMSSTLYTVPFNLIAEYHREEEKEKGQEAPGGPDNQGRGKGVDCAALTCMVQLAQILVGGGLGFLVNMAGSVVVVVITASAVSLIGCCFVALFVRYVD

SEQ ID NO: 23903 - protein, 553 aa, Mus musculus
MIQRLWASRLLRHRKAQLLLVNLLTFGLEVCLAAGITYVPPLLLEVGVEEKFMTMVLGIGPVLGLVSVPLLGSASDQWRGRYGRRRPFIWALSLGVLLSLFLIPRAGWLAGLLYPDTRPLELALLILGVGLLDFCGQVCFTPLEALLSDLFRDPDHCRQAFSVYAFMISLGGCLGYLLPAIDWDTSVLAPYLGTQEECLFGLLTLIFLICMAATLFVTEEAVLGPPEPAEGLLVSAVSRRCCPCHVGLAFRNLGTLFPRLQQLCCRMPRTLRRLFVAELCSWMALMTFTLFYTDFVGEGLYQGVPRAEPGTEARRHYDEGIRMGSLGLFLQCAISLVFSLVMDRLVQKFGTRSVYLASVMTFPVAAAATCLSHSVVVVTASAALTGFTFSALQILPYTLASLYHREKQVFLPKYRGDAGGSSGEDSQTTSFLPGPKPGALFPNGHVGSGSSGILAPPPALCGASACDVSMRVVVGEPPEARVVTGRGICLDLAILDSAFLLSQVAPSLFMGSIVQLSHSVTAYMVSAAGLGLVAIYFATQVVFDKNDLAKYSV

SEQ ID NO: 23904 - protein, 450 aa, Mus musculus
PRAGWLAGLLYPDTRPLELALLILGVGLLDFCGQVCFTPLEALLSDLFRDPDHCRQAFSVYAFMISLGGCLGYLLPAIDWDTSVLAPYLGTQEECLFGLLTLIFLICMAATLFVTEEAVLGPPEPAEGLLVSAVSRRCCPCHVGLAFRNLGTLFPRLQQLCCRMPRTLRRLFVAELCSWMALMTFTLFYTDFVGEGLYQGVPRAEPGTEARRHYDEGIRMGSLGLFLQCAISLVFSLVMDRLVQKFGTRSVYLASVMTFPVAAAATCLSHSVVVVTASAALTGFTFSALQILPYTLASLYHREKQVFLPKYRGDAGGSSGEDSQTTSFLPGPKPGALFPNGHVGSGSSGILAPPPALCGASACDVSMRVVVGEPPEARVVTGRGICLDLAILDSAFLLSQVAPSLFMGSIVQLSHSVTAYMVSAAGLGLVAIYFATQVVFDKNDLAKYSV

SEQ ID NO: 23905 - protein, 553 aa, Rattus norvegicus
MIQRLWASRLLRHRKAQLLLVNLLTFGLEVCLAAGITYVPPLLLEVGVEEKFMTMVLGIGPVLGLVSVPLLGSASDQWRGRYGRRRPFIWALSLGVLLSLFLIPRAGWLAGLLCSDTRPLELALLILGVGLLDFCGQVCFTPLEALLSDLFRDPDHCRQAFSVYAFMISLGGCLGYLLPAIDWDTSALAPYLGTQEECLFGLLTLIFLICVAATLLVAEEAVLGPPEPAEGLLVSSVSRRCCSCHAGLAFRNLGTLFPRLHQLCCRMPRTLRRLFVAELCSWMALMTFTLFYTDFVGEGLYQGVPRAEPGTEARRHYDEGIRMGSLGLFLQCAISLFFSLVMDRLVQKFGTRSVYLASVMTFPVAAAATCLSHSVVVVTASAALTGFTFSALQILPYTLASLYHREKQVFLPKYRGDAGGGSSEDSQTTSFLLGPKPGAPFPNGHVGPGGSSILVPPPALCGASACDVSMRVVVGEPPEAKVVTGRGICLDLAILDSAFLLSQVAPSLFMGSIVQLSHSVTAYMVSAAGLGLVAIYFATQVVFDKNDLAKYSL

SEQ ID NO: 23906 - protein, 801 aa, Rattus norvegicus
MAPQNADSESMQVQELPVPLPDPQKPRDPAAETQEETTSEASIDRIPTRLWVMHGAVMFGREFCYAMETALVTPILLQIGLPEKYYSLTWFLSPVLGLIFTPLIGSASDRCTLSWGRRRPFILVLCVGVLIGVALFLNGSAIGLALGDVPSRQPIGIVLTVLGVVVLDFSADATEGPIRAYLLDVVDSEEQDMALNIHAFSAGKDPCQAPGLGGAIGYVLGGLDWTQTFLGDWFQTQNQVLFFFAAVFFSVSVALHLFSIEEEQYNPQQDRGPEDATLPSTDEVQSEHELSLDYLDVDIVRSKSDSVLHMADSTLDMEPQLLFLHDIEPSIFQDASYPSTPQSTSQELLRAKLPRLSTFLRESTKEDDTLLDNHLNEAKVPNGRGSPPMNPLSHSKVDLKPSVTSSSMRRRRHMFHRQSSSTFSYYGKIGSHCYRYRRANAVVLIKPSRSMSDLYDLQQRQRSRHRNQSGATASSGDTESEEGETETTVRLLWLSMLKMPKELMWLCLCHLLTWFSVIAEAVFYTDFMGQVIFKGNPQVSTLGLPVLLPREFGSFRAGPPVSLHALPLHPRGRVDQAPSNSTKWHAYNAGVKMGCWGLVIYAATGAICSALLQKYLDNYDLSIRIIYMLGTLGFSVGTAVMAMFPNVYVAMVTISTMGVVSMSISYCPYALLGHYHDIKEYVHHSPGNSKRGFGIDCAILSCQVYISQILVASALGGVVDTVNTIVVIPIVASVGSFLGFLTATFLVIYPEVSEEAKEEQKGLSSGAAGEGESGAGTEKPTVLKLSRKGGLRGLMETESMV

SEQ ID NO: 23907 - protein, 751 aa, Rattus norvegicus
MIPPAGSTPPGEALIPSVAPQDFWRSPISGYSGSVTRHISHRANNFKRHPKRRKYIRPSPPPPPNTPCPIELVDFEDLHPQRSFWELLFNGCILFGIEFSYAMETAYVTPVLLQMGLPDQLYSLVWFISPILGFLLQPLLGAWSDRCTSRFGRRRPFILVLAIGALLGLSLLLNGRDIGMALADTATNHKWGILLTVCGVVLMDFSADSADNPSHAYMMDVCGPVDQDRGLNIHALMAGLGGGFGYVVGGIHWDKTSFGRALGGQLRVIYIFTAITLSVTTVFTLVSIPERPLRPLGEKRTAMKSPSLPLPPSPPVLLEEGAGDTLPSTTATSLYASFSSPISPPSPLTPKYGSFISRDSSLTGINEFASSFGTSNIDSVLIDCFTAGHDNYLALPSSVPRQAISVSFPRAPDGFYCQERGLERREGPLTLGLDGDVLRVGSLDTSKPRASGILKRPQTLALPDVAGGNGPETSRRRNVTFSQQVANILLNGVKYESELTGSSEQSEQPLSLRRLCSTIYNMPRPVRNLCVNHFLGWLSFEGMLLFYTDFMGEVVFQGDPKAPHASEAYQKYNSGVTMGCWGMCIYAFSAAFYSAILEKLEECLSVRTLYFIAYLLFGLGTGLATLSRNLYVVLSLCTHYGILFSTLCTLPYSLLCDYYQSKKFAGSSADGTRRGMGVDISLLSCQYFLAQILVSLVLGPLTSAVGSANGVMYFASLVSFLGCLYSSLCVTYEIPSADAADEERQPLLLNV

SEQ ID NO: 23908 - protein, 619 aa, Rattus norvegicus
MSGSNGPTDTRAYQSLAEDCPFGSAEQPKRSTGRLVMHSMAMFGREFCYAVEAAYVTPVLLSVGLPKSLYSMVWLLSPILGFLLQPVVGSASDHCRARWGRRRPYILTLGVMMLLGMALYLNGDAAVSALVANPRQKLVWAISITMIGVVLFDFSADFIDGPIKAYLFDVCSHQDKEKGLHYHALFTGKVVSVPSASGQKNCFPSEEDGGNTLGLVSFYFRKEAQERYSPYVDLNYGLGTRPINEPEMHSSLILNQEKKPESGFMSPVRKRGVSHLGFGGALGYLLGAIDWMHLELGKLLGTEFQVMFFFSALVLTLCFITHLCSIPEDPLRDDATDPPLQPDPQGSSLSADGMPRYGSIEKVKNGDADTGLPVQGGKNKKPSGQSQRTMSMKSLLRALVNMPSHYRCLCISHLIGWTAFLSNMLFFTDFMGQIVYHGDPYGAHNSTEFLIYERGVEVGCWGLCINSVFSSVYSYFQKVMVSYIGLKGLYFMGYLLFGLGTGFIGLFPNVYSTLVLCSMFGVMSSTLYTVPFNLIAEYHREEEKEKQQEVPGGPDNHGRGKGVDCAALTCMVQLAQILVGGGLGFLVNMAGSVVVVVITASAVALIGCCFVALFVRYVD

SEQ ID NO: 23909 - protein, 265 aa, Viscum album subsp. album
IAAGVQFGWALQLSLLTPYVQELGIPHKWASIIWLCGPLSGLFVQPLVGVMSDRCTSRFGRRRPFIFAGSLLIAISVLIIGHSADIGWWLGDRGGVRPRAIGAFVFGFWILDVANNMTQGPCRALLADLTGKDHRRTRVANAYFSLFMAIGNILGFATGSYNGWYKVFPFTVTSACNIDCANLKSAFYLDVVFMAITACISISAAQESPLDLPARSMLADEEMLGQSNSVQEAFLWELFGTFRCFPSTVWIILLVTALNWIAWFP

SEQ ID NO: 23910 - protein, 502 aa, Alonsoa meridionalis
MEVGNEAKSTALPPAQAAPVKNIIVVAAIAAGVQFGWALQLSLLTPYVQLLGVPHVWAAFIWLCGPISGLLVQPIVGYYSDNCTSRFGRRRPFIAAGAGLVAVAVFLIGFAADLGHMGGDSLGKGTKPRAVAVFVVGFWILDVANNMLQGPCRALLADMSAGNAKKMSSANSMFSFFMAVGNVLGYAAGSYTRLYKVFPFSKTEACAVYCANLKSCFFISVALLLTVTIIALCIVRETPYTAPPEEAGTVKKHTVPVFGELFGALKDLPRPMWMLLLVTALNWVAWFPFLLFDTDWMGKEVYGGKVGEGSLYDKGVRVGALGLMLNSVVLGVASLGVQVTARGLGGVKRLWGSVNLLLAICLAMTVLITKMAQHHREYASVGGAAPTLQPPVHGVKIGALALFSVLGIPLAATFSIPFALASIYSSNSGAGQGLSLGVLNLAIVIPQMFVSVASGPWDALFGGGNLPAFVVGAVAATVSGIIALTALPSPPSDVKILATGGH

SEQ ID NO: 23911 - protein, 510 aa, Asarina barclaiana
MENGDHRTAPAFQLQQASPPEAAPVRNIILVAAIAAGVQFGWALQLSLLTPYVQLLGIPHTWTAFIWLCGPVSGMLVQPIVGYYSDNCTLRFGRRKPFIAGGAGLVVVAVFLIGFAADIGYAAGDTLGKGTKPRATAVFVVGFWILDVANNMLQGPCRALLADLSGGNARKMSNANALYSFFMAVGNVSGYAAGSYTHLFKIFPFSKTKACDVYCANLKSCFFISVALLLCVSALALTIVRETPPPETAEAPEATKKKKIPVFGELFSALKNLPRPMWFLLLVACLNWIAWFPFLLFDTDWMGKEVYGGTVAEGKMYDRGVRAGALGLMLNPVVLGFSSLGIQAIARGVGGPKRLWGGVNFLLAVCLALTVVITKQAEHSRLYTVGADGVQILLPPVPGVKISALALSGVLGIPLAVTFSIPFALASIYSSNYGAGQGLSLGVLNLAIVIPQMVVSVASGPLDALFGGGNIPAFVMGAVAAAVSGIFAVTMLPALPADASTKNLSVGSFH

SEQ ID NO: 23912 - protein, 506 aa, Hordeum vulgare subsp. vulgare
MPPRRPNTGGGGGTSSSAAPAPRKVPLRSLLRAASVACGVQFGWALQLSLLTPYVQELGIPHAFASLVWLCGPLSGLLVQPLVGHLSDRITPANSPLGRRRPFIAAGAASIAFAVLTVGFSADLGRLFGDNVVPGSTRIGAIIVYLVGFWLLDVGNNATQGPCRAFLADLTENDPRRTRIANAYFSLFMALGNILGYATGAYNGWYKIFPFTITGSCGVSCANLNSAFLLDIIILAITTYISVATVQDNPTFGSDEAAPPSSHEEEAFLFELFGSFKYFTMPVWMVLIVTSLTWVGWFLFILFDTDWMGREIYRGSPEIVADTQKYHDGVRMGSFGLMLNSVVLGITSIGMEKLCRKWGAGLVWGVSNIIMALCFVAMLIITYVAQNLDYGPSGAPPTGIVAASLIVFTILGAPLSITYSIPYAMAASRVENLGLGQGLAMGILNLSIVIPQIIVSLGSGPWDQLFGGGNAPSFWVAAAASFVGGLVAILGLPRARLGPKKKTTQR

SEQ ID NO: 23913 - protein, 523 aa, Hordeum vulgare subsp. vulgare
MARGGGNGEVELSVGVGGGGGGAAPRAAEPAVQISLGRLILAGMVAGGVQYGWALQLSLLTPYVQTLGLSHALTSFMWLCGPIAGLVVQPCVGLYSDKCTSRWGRRRPFILTGCVLICLAVIIVGFSADIGAALGDSKEECSLYHGPRWHAAIVYVLGFWLLDFSNNTVQGPARALMADLSAQHGPSAANSIFCSWMALGNILGYSSGSTNNWHKWFPFLRTRACCEACANLKGAFLVAVLFLSLALVITLIFAKEVPYKAIAPLPTKANGQVEVEPTGPLAVFKGFKNLPPGMPSVLLVTGLTWLSWFPFILYDTDWMGREIYHGDPKGTPAEANAFQEGVRAGAFGLLLNSVVLGFSSFLIEPMCKRLGPRVVWVSSNMLVCLSMAAICIISWWATQDLHGYIQHAITASKEIKAVSLALFAFLGIPLAILYSVPFAVTAQLAANKGGGQGLCTGVLNIAIVIPQVIIAVGAGPWDELFGKGNIPAFGMASVFALIGGVVGIFLLPKISRRQFRAVSGGGH

SEQ ID NO: 23914 - protein, 451 aa, Neisseria meningitidis MC58
MSEYTPQTAKQGLPALAKSTIWMLSFGFLGVQTAFTLQSSQMSRIFQTLGADPHNLGWFFILPPLAGMLVQPIVGHYSDRTWKPRLGGRRLPYLLYGTLIAVIVMILMPNSGSFGFGYASLAALSFGALMIALLDVSSNMAMQPFKMMVGDMVNEEQKGYAYGIQSFLANTGAVVAAILPFVFAYIGLANTAEKGVVPQTVVVAFYVGAALLVITSAFTIFKVKEYDPETYARYHGIDVAANQEKANWIELLKTAPKAFWTVTLVQFFCWFAFQYMWTYSAGAIAENVWHTTDASSVGYQEAGNWYGVLAAVQSVAAVICSFVLAKVPNKYHKAGYFGCLALGALGFFSVFFIGNQYALVLSYTLIGIAWAGIITYPLTIVTNALSGKHMGTYLGLFNGSICMPQIVASLLSFVLFPMLGGLQATMFLVGGVVLLLGAFSVFLIKETHGGV

SEQ ID NO: 23915 - protein, 451 aa, Neisseria meningitidis Z2491
MSEYTPQTAKQGLPALAKSTIWMLSFGFLGVQTAFTLQSSQMSRIFQTLGADPHSLGWFFILPPLAGMLVQPIVGHYSDRTWKPRLGGRRLPYLLYGTLIAVIVMILMPNSGSFGFGYASLAALSFGALMIALLDVSSNMAMQPFKMMVGDMVNEEQKGYAYGIQSFLANTGAVVAAILPFVFAYIGLANTAEKGVVPQTVVVAFYVGAALLVITSAFTIFKVKEYNPETYARYHGIDVAANQEKANWIELLKTAPKAFWTVTLVQFFCWFAFQYMWTYSAGAIAENVWHTTDASSVGYQEAGNWYGVLAAVQSVAAVICSFVLAKVPNKYHKAGYFGCLALGALGFFSVFFIGNQYALVLSYTLIGIAWAGIITYPLTIVTNALSGKHMGTYLGLFNGSICMPQIVASLLSFVLFPMLGGLQATMFLVGGVVLLLGAFSVFLIKETHGGV

SEQ ID NO: 23916 - protein, 453 aa, Lactobacillus gasseri
MMREKTMNENDKVAGLPELAKSVIWMINFGYLGIQIAFTLETSQMSRIFQTLGADPTKLGWFFILPPLAGLVVQPAIGSLSDKTWAPKLGGRRLPYLLIGMIFAVIMMLLLPNIGNFGLGYGSVEALVFGAIAIAILDVSANMAMQPFKMMIGDMVNDEQKSYAYGIQSMLSNSGAVIAAFFPFLLTILGVANTAKKGVVPQSVVISFYVGAAILVITSLLTVTKVHEYDPQTYARYHGINEEDNKKDGNWFVLLKKAPKVFWEVSLVQLFCWFSFQYLSTYATGAIAANVWKAFDPASVGYQLAGNWFGVLTAVQSIAAVIWSYILAKVPNDHHKLGYGISLLLGAVGYGSIFFIQSQNLLILSFILIGISWAAMNTYPLTLVSNALSGKHMGTYLGLFNCSICLPQIIASLLSFVLFPLLKCSMPAMMLTAGISGVLGAISVLFIKETYGN

SEQ ID NO: 23917 - protein, 539 aa, Beta vulgaris
MEGRNVKNGDTNNNKIVGSSLSIEKNPISPPEASSLKKLALVASIAAGVQFGWALQLSLLTPYVQLLGIPHTWAPYIWLCGPISGMIVQPTVGYYSDRCTSKFGRRSPFIAVGATLVGFAVSLIGFAADIGHATGDPNGNVPKPRAIAVFVVGFWILDVANNTLQGPCRALLADMAAGSQAKTRYANAFFSFFMALGNIGGYAAGSYSRLYTVFPFTHTKACDTYCANLKSCFFISITLLIVLTILALSVVRERPFTLDEIQEEENLKNNTGGCARLPFFGQLFGALKDLPKPMLILLLVTCLNWIAWFPFLLFDTDWMGKEVYGGTVGEGKAYDMGVHAGALGLMINSVVLGIMSLGIEKLARLVGGVKRLWGIVNLILAVCLAMTILVTKSAEHYRATHHVPGAIGPPLPPPGFKGGALAIFSVLGIPLAITFSIPFALASIFSASSGSGQGLSLGVLNLAIVVPQMFVSVTSGPWDALFGGGNLPAFVVGAVAATASAILSFTLLPSPHRKPKSEGQWVAIKNKEAVLIFNFLFFI

SEQ ID NO: 23918 - protein, 523 aa, Beta vulgaris
MEGRNVKNGDTNNNKIVGSSLSIEKNPISPPEASSLKKLALVASIAAGVQFGWALQLSLLTPYVQLLGIPHTWAPYIWLCGPISGMIVQPTVGYYSDRCTSKFGRRSPFIAVGATLVGFAVSLIGFAADIGHATGDPNGNVPKPRAIAVFVVGFWILDVANNTLQGPCRALLADMAAGSQAKTRYANAFFSFFMALGNIGGYAGSYGRLYTVFPFTHTKACDTYCANLKSCFFISITLLIVLTILALSVVRERPFTLDEIQEEENLKNNTGGCARLPFFGQLFGALKDLPKPMLILLLVTCLNWIAWFPFLLFDTDWMGKEVYGGTVGEGKAYDMGVHAGALGLMINSVVLGIMSLGIEKLARLVGGVKRLWGIVNLILAVCLAMTILVTKSAEHYRATHHVPGAIGPPLPPPGVKGGALAIFAVLGIPLAITFSIPFALASIFSASSGSGQGLSLGVLNLAIVVPQMFVSVTSGPWDALFGGGNLPAFVVGAVAATASAILSFTLLPPPPPEAKIGGSMGGH

SEQ ID NO: 23919 - protein, 458 aa, Staphylococcus epidermidis ATCC 12228
MGEIGMNDTDRTHKENKLEQDITLPYLKKAVIFSITFGFFGVNMAFALQSAMMGRIFQTLGANPNNLGWFFILPPLVGMIVQPLIGYYSDRTWTRFGRRMPYLLIAGPIGAIVLVLLPNAGSFGFGYASLMALSFGAVMTLLMDLTSNACMQPYKMIIGDMVNEKQRDMAWSWQQIFSNLGGIIATVLPFLLTMLGISNVAPKGEVPMTVKLAYYIAAAVLLIASIWTVISVREYEPKTYNYYHGINENNRNNKLNLLQLLKKAPKQFWQISVVQFFNWFALMYLWTYSTGAIAKNVWNVTDPSSAGYQAAGNWYGVLYCIQFLSSVIFGFVIARSKPSQRKFWYSFGLVFGGIGLISIFFIHNQWLLIFSFVLIGINNLTMNTQPFTLLTEAIDGENSGAYLGLFNTSICLPQIVASIVSFGLYPLLGSSMPAMLLLAGIMMLLGAVSVKFINAKFE

SEQ ID NO: 23920 - protein, 479 aa, Anopheles gambiae str. PEST
STKTRWELVRLSLLIVGIECTYATETAFVAPILLAIGLPHTLMTMMWAMPPIVGVLFVPVVASVSDRLRSSWGRRRPVLLLLGIAMLLGMMLLPHGRAIGEAIGLRSVAWVATITTLGLTTTDFSAEASNGLCRTYAMEVCTIRDQARVLSTMMLIGGLGGMLGYLFGAIDWIALPIGQYFESNEAAVFTANWIVLLIGLVSTLTSFAEIPLPVQEQDAMLRPVTHSMLQNEVKRMRGDEYATQTQLSESIGFRQFVRNTVQMPRSMKILCLTQFLSHMGYLPYCLYFTDFVGAEVFGGDVQAPEHSPAFVLYEEGLRFACWGMALFAGCASLYSLVIERLIDRVGARPVYVGGLMAHCVGMVAMGLLRHRAIVMLCCSLTGIMYTTIYSIPFLLISHYHSKNSFHMKDGKCVESTEPRGFGADVSMMSSVLCLAQLIVSLVMGVLIDAAGTTTVITYVAGGCTLLAALSAMAVLYMGL

SEQ ID NO: 23921 - protein, 504 aa, Anopheles gambiae str. PEST
KKSRLELIRLSSVIVGIEFLYAAETAFVTPILLGIGLSHTFMTMVWAFSPVLGFFFAPMIASFSDTIRVQWGRRRPVLLALGLAMMTGMWILPHGKTIGVFFGDPDVPVDQMEGFRWSIPVTIIGLVLTDFDAETSNGIARAYFMDMCAPDDQSRVLTTAMFIGGLGGTAGYVLGAIDWSQTNLDILGSNEATVFMFVFIVMGVGLLITLTSYREVPLPLLERDPLLRPINSNAFEAEKSRQLAVYSISKDVIPQPIKPDQDAAIGIGDDDDEKPLRLRDFVRNIVHMPKSLFILYSTQFFSQLGYLSYCLYFTDFVGSEVFGGDVAGAPGSPELALYEEGVRYGCWGMAVFAVCSAFYSAVIERLVKRFSARPVYMAGLLLFSLGMLLMGLVKEKFMIFIACPTVGIMYATMYSLPYLLISQYHSKNSFEVKDGKCVPNTTKRGFGADVSMMSCMLFLAQLIISLAIGSIIDAVETNVVVIFSASIFSLVAALTASQIVYMGL

SEQ ID NO: 23922 - protein, 438 aa, Anopheles gambiae str. PEST
LIRISAAVMGIEFSYAAETAFVSPTLLKIGVEHQHMTLVWCLSPLVGFFLTPVLGSLSDRCRSKFGRRRPFIMLLSLGVLLGLLLVPNGEDVGTVDPVVSTVIPPTVPEHRPRHPWGIFFTILGTVLLDFDADACQSPARAFLLDVTVPEDHARGLSTFTIMAGLGGFMGYSLGGIDWDSTSLGIVLGGHVRAVFSLITVIFIVCVLCTVTSFSEIPLWILEEELERQDPPVEGRSNRLASEEPATYGATRHDRRSQPEASPASASYDELPGENFTETSFSGDKPTVTLSMYLLSIVYMPHSLRMVCLTNLFCWMAHVCYSLYFTDFVGEAVFDGDPKALDGTEKYLLYEAGVRFGCWGMAMYSLSCACYSLIIERLIKRFRAKSVYVGGLLFYCLGMSLMALSKHRVGVIVFSWTAGVMYSTLFTMPYLLVAHYHSE

SEQ ID NO: 23923 - protein, 679 aa, Anopheles gambiae str. PEST
MYREIKSIYNWLASAAISGTQTLTDSRRPIIRALQCSRRQRSFSSSSSSRGGTADLTMVKTGPGGGPSAASGRVVLARRKSLAQKDPLVEELRKAREENARQQQYDYSHVFRYEGHWVGGGRIMQISEMIREPCKKKTLLDFVRLSFVIMGIEIVYSAETAFVTPILLGIGIEHQLMTIVWGISPLIGFIVSPFLGTFSDRCRSRFGRRRPLLVVLGIGLVLGCLLLPFGETIGHWLGDTGESEKPVINNTVTIGGNRNPYGSATASTAHYKWAIVVTILGTILLDFCADSSQAPSMAYLLDVSLPDDHGQACSTYSLLSGVGGCIGYLIGAIDWNGTMLGELLGGNINTVFILVTVIFVLCLAVTVGSFREIPLPLMERDELLQPLTERAVTEQRQRTTVEKGLRPMKDIADALLLELEGDDSEPSDRTALLSYSEKEPLMGDFLQEKPKSSAKEFLRITFRIPATLAVLCVTNLFCWMSHISYSLYFTDFVGEKVFGGDPMAHSDSDEYALYIEGVRYGCFGMAIYSIACSTYSCTIERLIRVFRARNVYSGGLLIDFVGMLLMAMFPSKVTVYVFSVTGGIVGALLFTMPYIILAKYHAKGLLDTCDETNSIQPRRGLASDISIIGSMLFVAQIILSLTMGPLVTLTGTTASVIYTASVCSLVASLCATQIQYLDL

SEQ ID NO: 23924 - protein, 605 aa, Anopheles gambiae str. PEST
MVAGAGGSNFHSEFRNDPVVKEMRQIREENARRQKHDYSHVFRISAVIMGMEFVYSAETAFVSPILLSIGIEHQLMTMVWGISPLIGFFLSPVIGSVSDRCRSRFGRRRPVLFALGVGLITGCILVPYGRNIGAWFGDLGEYVDDPANTINGAAALIDINGTVVSDALRSYNFYRIEEQIAEHRTDYRWAIVITIIGTILTDFNADNCMTPSRAFLLDVSLPEDHGRACSTFSILAGLGGSIGYAMGGINWDETSFGEFLGGSIKTVFTLVVIIFTICLTISLTSFREIPLPLLESDDLLRPLTEAAIKKEKARRQNQIFVVKDVSKALTAQLQSIQSPQDAVPQKINNALVDVERAPRGKDEVELVEEEDENVQMGPMDFIKSIVMMPKSIAVLCLTNLFCWMSHLSYALYFTDFVGEEVFKGNPAAPSNSDEYKLFLEGVRYACFGMAIYSISCSTCSFTIEKLIKVLRARTVYCGGLILDAIGMACMAFFPNKVTVYVLSATGGIVYALLFTMPFLLLGQYHAKGTFKVAKPGAEVTQERKRGLATDIAVVGGMIFVAQIIVALGMGSLISAFGTTSVVVFSASICSLIASICASQVVYMDL

SEQ ID NO: 23925 - protein, 439 aa, Xanthomonas campestris pv. campestris str. ATCC 33913
MSSTAPPLSFARILALNAGFFGVQYSFGLQQSNMSPIYNYLGADHASLPYLWLAGPITGLVLQPFVGALSDRSVTRWGRRMPYMVLGALVCSLCLLAMPFSTALWMAVCLLWVLDAANNVAMEPYRALVSDVLAPPQRPLGYLTQSAFTGLAQTLAYLTPPLLVWFGMSQDAANAHHIPYVTIAAFVIGAGFSAASILLTARSVREPVVPAAEIARMRKAGTGLGATLREIGSALRDMPPTMRQLAPVMLFQWYAIFSYWQYIVLSLSTTLFGTTEANSHGFREAGLVNGQIGGFYNFIAFLAAFAMVPVVRRVGPKYTHAACLLAAGVGMWVLPGIENRWLLLLPMIGIGLAWASMMGNPYLMLADSIPPERTGVYMGLFNLFIVLPMLIQIVTLPLYYEPLLHGDPRNVIRLAGALMLAAAVAMLCVRIRKPKAVAA

SEQ ID NO: 23926 - protein, 492 aa, Xanthomonas campestris pv. campestris str. ATCC 33913
MKAKPTLSFWQIWNMCFGFLGIQFGFALQNANASRIFQTLGAQVDDVPGLWIAAPLTGLIVQPIIGYLSDRTWTGWGRRRPYFMIGAVFTTLALLVMPNAPVLWIAAGTLWVLDASINISMEPFRALVGDQLPAEQRPSGYAMQSFFIGVGAIVASFLPWLLTRWGVDNTAPAGELPDSVRYAFYLGAAVLFLSISWTVLRTREYSPAELAAFEPAPAPAAAQLAATDQPSLQASVLWCLGGLLLAAAIAWQHGDRMLYVLAGLCIAYGVLLALARVLPRGGMLVAIMHDLRHMPQTMRRLAWVQFFSWFALFAMWIYTTAAVPQVHFGARDTVSAAYNDGANWVGVLFGAYNGFAALAATVIPLMVRAIGLRWSHLCNLWLGAAGLLSMLFIRDPYWLLLSMLGVGFAWASILSLPYALLSDSVPAAKMGVYMGIFNFFIVIPQLVAASALGFVLRVWLGGQPIYALAIGGLSLIVAGVCVVRVPSAQGGQ

SEQ ID NO: 23927 - protein, 439 aa, Xanthomonas axonopodis pv. citri str. 306
MSSTVPPLSFARILALNAGFFGVQYSFGLQQSNMSPIYNYLGADHANLPYLWLAGPITGLVLQPFVGAWSDRSVTRWGRRMPYMVLGALVCSLCLLAMPFSTALWMAVCLLWVLDAANNVAMEPYRALVSDVLTPPQRPLGYLTQSAFTGLAQTLAYLTPPLLVGMGMNQDAANAHHIPYVTIAAFVIGAGFSAGSILLTARSVREPAIAPAEIARIRQSGAGLGATVREIGSALREMPPTMRQLAPVMLFQWYAIFCYWQYIVLSLSTTLFGTTDPTSHGFREAGLVNGQIGGFYNFVAFLAAFAMVPVVRRFGPKYTHAACLVAAGIGMWLLPGIENRWLMLLPMIGIGLAWASMMGNPYLMLADSIPPERTGVYMGLFNLFIVLPMLIQIVTLPLYYEHVLHGDPRNVVRLAGALMLAAAAAMLCVRLRKPKAVAA

SEQ ID NO: 23928 - protein, 492 aa, Xanthomonas axonopodis pv. citri str. 306
MTAKPRLDFWQIWNMCFGFLGIQFGFALQNANASRIFQTLGAQVDDVPGLWIAAPLTGLVVQPVIGYLSDRTWTPWGRRRPYFMVGAVFTTLALLVMPNAPMLWVAAGTLWVLDASINISMEPFRALVGDQLPPSQRPTGYAMQSFFIGIGAIVASFLPWLLTHWGIANTAPPGQLPDSVRYAFYLGAAVLFLSITWTVLRTREYSPEQLAGFDDAHPPLAQAVSTGMVPTSMASVLWCGLGVLLAAAIAWQHGDRMLYVLAGLCFAYGVLLALARMLPATSMLVAIVQDVRSMPMTMRRLAWVQFFSWFALFAMWIYTTAAVTQVHFGASDTASAAYNDGANWVGVLFGAYNGFAALAAVVIPLLVRAIGLRWSHLCNLWLGAAGLLSMLVIRDPQWLLLSMLGVGFAWASILSLPYALLSDSVPAPKMGVYMGIFNFFIVIPQLVAASALGFVLRVWLGGQPIYALAIGGLSLLIAGVCVVRVPVASGGQ

SEQ ID NO: 23929 - protein, 541 aa, Caulobacter crescentus CB15
MHFTLRVASARAQMPPAKRDEKFCEPAGSTGGRSGGGSMARQRLSFLQIWNMCFGFFGIQIGFGLQNANTSRIFQSLGVDVNHLAILWIAAPATGLLVQPIIGHFSDKTWGRFGRRRPYFFWGAILTTLALLVMPNSPTLWVAAAALWIMDASINITMEPFRAFVGDNLPDEQRATGYAMQSFFIGLGAVFASALPWMLTNWFDVANTAPAGQVPDSVRIAFYTGGAGLLLAVLWTVFTTREYSPEQLTAFEKAEREIAGLGLHEEPEPSVNAYIALGVGGVLLGAALALIVWGAGLEKELYVLAGLLFAFGLAGVAGARFKRIGRTDNGFSEVLADVFRMPKTMRQLAVVQFFSWFGLFAMWIYTTPAVATVHFGAVDASSKAYNEGADWVGVLFAVYNGVAALAALVIPLMVKVTSRRVSHAVCLGLGALGLLSFLVIRDPGLLWIGMVGVGFAWSSILSTPYSILAGALPARKMGVYMGIFNVFIVVPQLLAATLLGLMLKTFFGNQSIFALVLGALSFALAAAATFLVRDRVAGAPA

SEQ ID NO: 23930 - protein, 467 aa, Leuconostoc mesenteroides subsp. mesenteroides ATCC 8293
MIRANQLCFKKILEEVIMVDKKKGQGLPNLPLSTIWMLSFGFLGVQMAFSLQSSQMGRIFQTLGADPTKLGFFFILPPLAGLFVQPLVGYFSDRTWTKRFGRRMPYLLVGALVSVIVMFLLPNSGSFGFSTTAGLWFGAITILFMDLSSNVAMQPFKMVVGDMVNEDQKSYAYSIQSFLSNTGSVLATIFPFLLTAIGVANTAPKGQVPASVIISFYVGALVLVVFSLIAVFNVKEYDDATYELYHGYALNTPNDGEGGFLTLLKRAPKTFWMVTLTQFFCWMAFQYLWTYGTGAVADNIFHATDPTTAGYQNGGNWFGIMSAVYAIAAVVWSLVLSKIPANKNKTGYALSLFLGAIGFTSVFFIHSQYLLIGSFILIGISWAGMMAYPFIMVTNALPGDHMGTYLGLFNGSICLPQIVASVASFALFPALGSHFPSMILVSGILMLIGAVSVGFINEIHSNPVDAQ

SEQ ID NO: 23931 - protein, 457 aa, Leuconostoc mesenteroides subsp. mesenteroides ATCC 8293
MNIMSSNEHKKGQLPMLTSMQLFLMTFGYAGVQVAFSVQTGNMGRIFQTLGSDPTKLGFFFILPPLAGMITQPLIGLFSDKTWLPKLGRRMPYLIGGCLVSLIVLLLLPNTGSFGFGYGSMTALWFGAVTVLFMDLSANVSMQPFKMIIPDMVNEKQTDKAWSLQNIWGSLGGVIAFVFPFILTSFGVANTAARGVVPDSVKISFYVAAAILLLSTIFTIINVKEYDPETLAYYHGFRSDDKTHESFIDILKHAPKVFWTLGIVEFFVWFGIPYMWTYSTGALSENIWHVSDPASAGYQAAGNWFGILQAVYSVVAIVVGILFQRLNDKTRKMTYFLSLIAGGLGFIIVAYGHTHVSSLIGFVLIGIGWIALISIPFTILTNALDGKHDGVYLGLFNCFICIPQIVASVASFAIFPAVGKSMAHMLAIAGVFLMIGGCLIWIVKEEKTQVDMTQKGE

SEQ ID NO: 23932 - protein, 485 aa, Leuconostoc mesenteroides subsp. mesenteroides ATCC 8293
MMLPLTSGKRFQIFIYCFILFNVNGYKNNILEAEIMDDKHKGQGLPNLPLSTIWMLSFGFLGVQMAFSLQSSQMGRIFQTLGADPTKLGFFFILPPLAGLFVQPLVGYFSDRTWTKRFGRRMPYLLVGALVSVIVMFLLPNSGSFGFSTTAALWFGAITILFMDLSSNVAMQPFKMVVGDMVNEDQKSYAYSIQSFLSNTGSVLATIFPFLLTAIGVANTADKGQVPASVIISFYVGAVVLVVFSLVAVFNVKEYDDATYELYHGYALNTPNDNDGGFLTLLKRAPKTFWMVTVTQFFCWMAFQYLWTYGTGAVADNVFHATDPTTAGYQNGGNWFGILSAVYAIAAVLWSLVLSKIPAEKNKFGYALSLLLGSTGFISVFFIHSQYLLIASFILIGISWAGMMAYPFIMVTNALNGDHMGTYLGLFNGSICLPQIVASVASFVVFPALGSHFPSMILVSGVLMLLGAVSVGFIKEIHSNPVNAH

SEQ ID NO: 23933 - protein, 501 aa, Microbulbifer degradans 2-40
MNQTLQPRPRPELNFWQIWNMCFGFIGIQFGFALQTANVSRIFQTLGAEIDAIPILWIAGPITGLLVQPIIGYMSDRTWNRFGRRRPYFTIGAVAATACLFIMPHSPALWMAAGMLWIMDASFNIAMEPFRAFVGDMLPPKQRTQGFATQSFFIGVASVVASALPWMLTNWLGMENTAPEGEIPSTVVYAFYFGGAVLVTTVMWTVFRTKEYTPEEIAAFNQYEQHNDSQADTSDDHKNYVAGGIGFAAVAIASTIAIHYFELREELYILAGLAAMFGGLQLIAHILQSKGRIHNAIYQITHDLFNMPRTMVQLAIVQFFSWFALFALWIYTTPAVTAFHYGTSDTTSAMYNKGADWVGIMFAAYNAFAALAAFFIPIMARRWGQKTTHCINLMLGAAGYISMMLIKDPSWLWVSMIGIGFAWASILSLPYAMLSGALPSSKLGLYIGIFNFFIVIPQILAASVLGIAVSGLFDGQAIYALVLGGVFLIIAALATLKVNDQ

SEQ ID NO: 23934 - protein, 471 aa, Oenococcus oeni MCW
MNLSHASDSKISADIPLVNKKEKPLIKNTDKEEKHHLPKLRLSTIFAMTFGFFGINMAFSLQSSQLGRIFQTIGANPNNLGFFFILPPLAGMVIQPLIGKYSDRTWNRFGRRMPYLLIGAPAAAIVLILLPNAGSFGFGYASVAALCFGAVATLFMDLTSNICMQPFKMIIGDMVNEDQKDLAWSWQQSFSNLGGVLAAVIPFVLTLVGISNTAPKGEVPLTVKIAFYSAAIILLVTSLLTIIKVHEYDPKTYAQYHEIDLQAQKKSPSLVKLLKDAPRAFWETSVVEFFSWFAILYLWTYATGAISLNVWHTSNASSAGYQAAGNWYGVLTCIMSIAAVIWGIVVQARTKPTSRKFWYSFGLLAGAVGYFMIYFIHNKWLMIIPFCLIGISYLVINTQPFSLLTEALNGQHEGSYLGLFNCSICLPQICASVASFWLFPLMGQSMPAMFLVGGTSLVLGAISVRFVHSRF

SEQ ID NO: 23935 - protein, 529 aa, Shewanella oneidensis MR-1
MSADHTVTQLDSFSATTHSHATHSVQPELNFWQIFNMCFGFLGIQFGFALQNANVSRIFQTLGASIDEIPILWIAAPLTGLLVQPIIGYLSDNTWGCLGRRRPYFLIGAILTTLAIFVMPHSPTLWIAAGMLWIMDASINIAMEPFRAFVGDNLPPSQRTQGYAMQSFFIGIGAVVASALPYILSNFFNVANTAPAGEIADSVRYAFYFGGTVLFLAVTWTVISTKEYSPEELAAFHAKTKTDVEEQCKRSRTHKDYQFASFVWMGLGALLTFTVWAQDLDKQLYILSIGIFAFGPLQLYCALRLSQSQPSQRAQLGMVFNVVDDLFHMPKAMHQLAIVQFFSWFALFAMWIYTTSAVTSYHFGSSDVLSQAYNDGADWVGVLFASYNGFSAIAALFIPLLAKRIGIKLTHTFNMFCGGFGLISFYFIKDPNLLWLAMIGVGIAWASILSIPYAILSGTLPPKKMGVYMGIFNFFIVIPQLLAASVLGLILNGLFDGQPIYALITGGVFMLCAGIAVLFVEQPKALTPH

SEQ ID NO: 23936 - protein, 473 aa, Lactobacillus plantarum WCFS1
MNQPAVHPNKPIADVSSKPKTSTIANSLPNLPLKTIFAITFGFCGVNMAFSLQSSQMSRIFQTIGADPTKLGLFFILPPLAGLFVQPLVGKYSDRTWTRFGRRMPYLLFSAPLAALVMVLLPNAGSFGFGYASTAALLFGAIAILFMDLSSNVCMQPFRMIIGDMVNENQKDKAWSWQQAFSNLGGVLATILPFVLTYFGVANTAQKGVVPLSVRIAFYIGAIILLGISAYTIHTVKEYDPDTYALYHHINPEQHKHTKPIWQLVKEAPKAFWEVALVQLFAWIGIQYMWTYTTGAIAENVWHTTNAASAGYQAAGNWYGILTFIQSMAAVLYGFLVLSRTNPYKRKFWYRFGLASFAVGLVWVFFIHNQYLLIAPFCLIGIGFFTVHVEPFNIFTSSLDGANEGSYIGIFNGTICLPQILASVASFMVFKFVGNSMPGMMLIAGISMFIAVLAISIIKQDNPQEDLSENPTK

SEQ ID NO: 23937 - protein, 448 aa, Lactobacillus plantarum WCFS1
MKETSKTTAGLPKLSSNKIWMMSLGFLGVQMAFTLQSSQMSRIFQTLGADPNNLGWFFILPPLAGLIVQPIIGSLSDRTWAPRLGGRRLPYLILGTVVAAIVMLLLPNSGSFGFGYASMAALVFGAITVAFLDLSSNVAMQPFKMMVGDMVNDDQKSYAYGIQSFLLNTGAVIAAIFPFLLTLFGVANTASKGVIPNSVIWSFYIGAAILVVSTIITIARVREYDPVTYAKYHGIDESANKSGGNWLALLKKAPKVFWLVALVQFFCWMAFQYLWTYSTGAMAANVWHTTNASSAGYQAAGNWYGILSAVQSVAAVVWSYVLAKVPNNRHKLGYALSLLLGAIGFFSIFFIHSQSALVVSFILVGMAWAAMNTYPLTMVTNALSGEHMGTYLGLFNGSICLPQIVASLLSFALYPLFGNSQANMFIFAGIVLAVGAGTVGLIKETYKN

SEQ ID NO: 23938 - protein, 461 aa, Lactobacillus plantarum WCFS1
MMKKVSAEDTVKTSVKEDQTSFGFDNSLPNLPIKTILAMTFGCIGVNMAFTLQGSQMSRITQTIGVNPNSLGWFFLLPPLLGMFVQPLLGKYSDSTWTRWGRRIPYLLVGAPITVIVMIMLPFTGSFGFGYGSMTAMVYAAIAIALMDLFSNVCLAPYKMLAGDMVNEKQKNLAWSWQQVFGYAGGILAALLPYILTKVGIANTASKGQVPATVIWAYLIGAVMLLVTSLVTIFNVHEYDPKTYAKYHKINESKQKVTPSLWKLLKTAPRSFWELAIVQLFSWIGIMYTWTYATGAMANNIWNTTNPASSGFQAAGNWYGVMTAFYSVAALLWGLFYAKTKATQRKFWYSFGLFADAISIIIVATTHNQWVALIAFALYGIGNFTINTLPYTMLTTSLDGRNNGSYLGLFNIAVCLPQIIGSLASFIIFPLVGNSQSMMMIIGFVAMVIGGFSVAIVHEGK

SEQ ID NO: 23939 - protein, 528 aa, Citrus sinensis
MESTEAGAAAAAPTKNQSSIELRQPPPPPSSPMWKIVMVASIAAGVQFGWALQLSLLTPYVQLLGIPHKWSSLIWLCGPISGMIVQPIVGFHSDTCKSRFGRRRPFILAGAVLVAIAVFLIGYAADIGHSAGDSVTDSVKTRAIIIFVIGFWILDVANNTLQGPCRALADLSSGSSNKKTRTANSFFSFFMAVGNVLGYAAGSYTHLYHMLPFTKSKACDVYCANLKTCFFLSIALLITLTTIALFYVTEQRLEEIDDKETAPSTKDPFFSEIFGALKGLQKPMWILLAVTALNWIAWFPFLLFDTDWMGREVYGGNSKGSAEELRVYNNGVRAGSLGLMLNAIVLGFTSLGVEVLAKLIGGVKRLWGVVNFLLAVSLAFTFLITKLAESNRRSVTTAGGATHILPPPVGVKVGALAIFTVLGIPQAITFSVPFAMASIFSRTSAAGQGLSLGVLNLAIVVPQMLVSLLSGPFDAVCGGGNMPAFMVGAVAAALSGIVALTLLPSTTADVPPPITEAGTATANQTNKL

SEQ ID NO: 23940 - protein, 452 aa, Pyrococcus abyssi
MEFKYWRIFLLGFGFFGISIIWSLYNAYIPIFLQDTFRMSRTVTGFIMTIDNLFAVLLLPFLGALSDMTRTRIGRRKPYILLGAPSAAIMFALIPIARAHKNLALFMGVIVLMNFFMALFRSPVIAFMPDITPSEKRSQANGIINFMGGLGALLAYLGGKILYDINYAYPFYAGAAIMLIANMIVVLFVPEPEQYRVPGEGIDIKKIFTETAKKSFGELKENLKDVFASHERSLLAILLAIFFWFIAFNSLETFFTSYVKYHLYGIPIGAEETAVTRQIESTGAFIMGIVSLSFMIFAIPAGFLGAKLGRRKTITLGLIIIVIVLGLSYYIGQVQRPSSVSLTDPVIVKFMLLFFIAGIGWAMVNVNSLPMVVDMTTEEKVGGYTGLYYFFSQAANLVAPPLAGAFLDLIGYETLIPFAIVFFVLATITVQFVKRGDVKVGRKAIEYISDLD

SEQ ID NO: 23941 - protein, 505 aa, Vitis vinifera
MELAKPSSVFAIQDHQSSSPPTPIWKTVVVASIAAGIQFGWALQLSLLTPYVQLLGIPHKWAAFIWLCGPISGMIVQPVVGYHSDRCTSRFGRRRPFIAAGAVLVAIAVFLIGYAADIGRVSGDPLHNTIKTRAVAVFVVGFWILDVANNMLQGPCRALLADLSGTSARRTRTANALYSFFMAVGNVLGYAAGSFSKLHKMFPFARTQACDLYCANLKSCFFLSIALLLILTIIAFATVHETPLNRADIAVVEAGQPFYSQMMNAFRQLRRPMWVLLLVTCLNWIGWFPFLLFDTDWMGREVYGGTVGEGPRGRLYDLGVRAGSLGLMLNSVVLGLMSLGVEFFGRGVGGVKRLWGGVNFLLALCLALTVLVSKLAASWRHSLGGELHPPPIGIKAGALSLFAVMGVPLAITYSIPFALASIFCHSSGAGQGLSLGVLNLAIVVPQMMVSVASGPWDARFGGGNLPAFVVGAFAAALNGVLALTMLPAPPPDVPNTKDERTQPSS

SEQ ID NO: 23942 - protein, 510 aa, Plantago major
MENSNRGVGAKTIITTTPPPEEAAPIRNIFLVAAIAAGVQFGWALQLSLLTPYVQLLGIPHKWASYIWLCGPISGMIVQPVVGYFSDNCTSRFGRRRPFIAAGAGLVGVAVVLIGFAADLGHAGGDSLGDGLKPRAIGVFVFGFWILDVANNMLQGPCRALLADLSGGNTKKMANANSFFSFFMAVGNVLGYAAGSYSRMYKVFPFSKTKACDIYCANLKSCFIISITLLITLTTLALSIVREKRHVAEEQVTAAKKGFKIPVFPELFGALKDLPRPMWVLLLVTALNWIAWFGFLLFDTDWMGREVYGETQQHKAPELAVIYNKGVSAGALGLMLNSIVLGFASLGVQYMARALGGVKRLWGVVNFILAICLCMTIVITKVASHHRPYSNGVLQTPESSVKIGALVVFSALGIPLAITFSVPFALASIYSTTTGSGQGLSLGVLNLAIVIPQMIVSVASGPWDAMFGGGNLPAFVVGAVAAAASGIFAFTMLPSPPAESIKNLSVAGGH

SEQ ID NO: 23943 - protein, 503 aa, Plantago major
MGELSGIENGNKAIGEEAIPVWKFVLVASLAAGIQFGWALQLSLLTPYIQMLGLPHGAASFIWLCGPVSGLLVQPLAGYFSDRCKSRFGRRRPFIMSGACLVAAAVILIGFAADIGHSAGDDMTKKTKPRAVVVFVVGFWILDVANNMLQGPCRAFLADLSAGDEKKMTHAMSFFAFFMGIGNVLGYAAGSYNNLHRLLPFTRTDACEIFCANLKTCFLIHICLLMCLTITALSVVKEPLVNVVDDERKGGSLMVFVELFGALKNLSKPMWILMLVTCLNWIAWFPFLLYDTDWMGREVYGGKVNQSVYDMGVRAGAIGLMLNSVVLGITSILLYFFSKGAKAAKTWWLGVNIVLAVGLAGTVWVSYHAKSVRQLGASGEALPPSFEVKASALAIFAILGIPLAVTFSVPFALAAIYCSRNTNTGGAGQGLSLGVMNLSIVIPQIIVSLSSGPLDKAFGGGNLPAFIMGAVGAVFSGVLAFILLPAPKVDNGVNPFAVGGGGH

SEQ ID NO: 23944 - protein, 262 aa, Betula pendula
IAAGVQFGWALQLSPLTPYVQLLGIPHTWAPFIWLCGPISGLFVQPVVGYYSDRCTSRFGRRRPFIAAGSSLVAIAVFLIGYAADLGHVFGDPIDKTTKTRAIAVFVLGFWILDVANNMLQGPCRALLADLSGDDQRRMRTGNALYSFFMAVGNVLGFAAGSYTRLYKLFPFTSTEACDVYCANLKSCFFLSIALLLILTTIALTAVKEQILSPQPEPGTAGGEEKQVVPFFGEIFFALKGLQRPMRILLMVTCLNWIAWFP

SEQ ID NO: 23945 - protein, 525 aa, Spinacia oleracea
MAGRNIKNGENNKIAGSSLHLEKNPTTPPEAEATLKKLGLVASVAAGVQFGWALQLSLLTPYVQLLGIPHTWAAYIWLCGPISGMIVQPLVGYYSDRCTSRFGRRRPFIAAGAALVAVAVGLIGFAADIGAASGDPTGNVAKPRAIAVFVVGFWILDVANNTLQGPCRALLADMAAGSQTKTRYANAFFSFFMALGNIGGYAAGSYSRLYTVFPFTKTAACDVYCANLKSCFFISITLLIVLTILALSVVKERQITIDEIQEEEDLKNRNNSSGCARLPFFGQLIGALKDLPKPMLILLLVTALNWIAWFPFLLFDTDWMGKEVYGGTVGEGKLYDQGVHAGALGLMINSVVLGVMSLSIEGLARMVGGAKRLWGIVNIILAVCLAMTVLVTKSAEHFRDSHHIMGSAVPPPPPAGVKGGALAIFAVLGIPLAITFSIPFALASIFSASSGSGQGLSLGVLNLAIVVPQMFVSVTSGPWDAMFGGGNLPAFVVGAVAATASAVLSFTLLPSPPPEAKIGGSMGGH

SEQ ID NO: 23946 - protein, 513 aa, Arabidopsis thaliana
MGAYETEKPTKDAAALETQSPEDFDQPSPLRKIISVASIAAGVQFGWALQLSLLTPYVQLLGIPHKWSSLIWLCGPVSGMIVQPIVGFHSDRCRSKFGRRRPFIATGAALVAVAVFLIGYAADFGYKMGDKLEEKVKVRAIGIFALGFWILDVANNTLQGPCRAFLADLAAGDAKRTRVANAFFSFFMAVGNVLGYAAGSYTNLHKMFPFTMTKACDIYCANLKTCFFLSITLLLIVTVTSLWYVNDKQWSPPPRNADDDEKTSSVPLFGEIFGAFKVMKRPMWMLLIVTALNWIAWFPFLLFDTDWMGREVFGGDSDGNERSKKLYSLGVQSGAMGLMFNSIVLGFMSLGVEWIGRKLGGAKRLWGIVNFILAAGLAMTVLVTKFAEDHRKTAGDLAGPSASVKAGALSLFAVLGIPLAITFSTPFALASIFSSCSGAGQGLSLGVLNLAIVIPQMIVSLGGGPFDALFGGGNLPAFIVAAIAAAISGVLALTVLPSPPPDAPKATTMGGFH

SEQ ID NO: 23947 - protein, 512 aa, Arabidopsis thaliana
MVSHPMEKAANGASALETQTGELDQPERLRKIISVSSIAAGVQFGWALQLSLLTPYVQLLGIPHKWASLIWLCGPISGMLVQPIVGYHSDRCTSRFGRRRPFIVAGAGLVTVAVFLIGYAADIGHSMGDQLDKPPKTRAIAIFALGFWILDVANNTLQGPCRAFLADLSAGNAKKTRTANAFFSFFMAVGNVLGYAAGSYRNLYKVVPFTMTESCDLYCANLKTCFFLSITLLLIVTFVSLCYVKEKPWTPEPTADGKASNVPFFGEIFGAFKELKRPMWMLLIVTALNWIAWFPFLLFDTDWMGREVYGGNSDATATAASKKLYNDGVRAGALGLMLNAIVLGFMSLGVEWIGRKLGGAKRLWGIVNFILAICLAMTVVVTKQAENHRRDHGGAKTGPPGNVTAGALTLFAILGIPQAITFSIPFALASIFSTNSGAGQGLSLGVLNLAIVVPQMVISVGGGPFDELFGGGNIPAFVLGAIAAAVSGVLALTVLPSPPPDAPAFKATMGFH

SEQ ID NO: 23948 - protein, 512 aa, Arabidopsis thaliana
MVSHPMEKAANGASALETQTGELDQPERLRKIISVSSIAAGVQFGWALQLSLLTPYVQLLGIPHKWASLIWLCGPISGMLVQPIVGYHSDRCTSRFGRRRPFIVAGAGLVTVAVFLIGYAADIGHSMGDQLDKPPKTRAIAIFALGFWILDVANNTLQGPCRAFLADLSAGNAKKTRTANAFFSFFMAVGNVLGYAAGSYRNLYKVVPFTMTESCDLYCANLKTCFFLSITLLLIVTFVSLCYVKEKPWTPEPTADGKASNVPFFGEIFGAFKELKRPMWMLLIVTALNWIAWFPFLLFDTDWMGREVYGGNSDATATAASKKLYNDGVRAGALGLMLNAIVLGFMSLGVEWIGRKLGGAKRLWGIVNFILAICLAMTVVVTKQAENHRRDHGGAKTGPPGNVTAGALTLFAILGIPQAITFSIPFALASIFSTNSGAGQGLSLGVLNLAIVVPQMVISVGGGPFDELFGGGNIPAFVLGAIAAAVSGVLGLTVLPSPPPDAPAFKATMGFH

SEQ ID NO: 23949 - protein, 512 aa, Arabidopsis thaliana
MVSHPMEKAANGASALETQTGELDQPERLRKIISVSSIAAGVQFGWALQLSLLTPYVQLLGIPHKWASLIWLCGPISGMLVQPIVGYHSDRCTSRFGRRRPFIVAGAGLVTVAVFLIGYAADIGHSMGDQLDKPPKTRAIAIFALGFWILDVANNTLQGPCRAFLADLSAGNAKKTRTANAFFSFFMAVGNVLGYAAGSYRNLYKVVPFTMTESCDLYCASLKTCFFLSITLLLIVTFVSLCYVKEKPWTPEPTADGKASNVPFFGEIFGAFKELKRPMWMLLIVTALNWIAWFPFLLFDTDWMGREVYGGNSDATATAASKKLYNDGVRAGALGLMLNAIVLGFMSLGVEWIGRKLGGAKRLWGIVNFILAICLAMTVVVTKQAENHRRDHGGAKTGPPGNVTAGALTLFAILGIPQAITFSIPFALASIFSTNSGAGQGLSLGVLNLAIVVPQMVISVGGGPFDELFGGGNIPAFVLGAIAAAVSGVLALTVLPSPPPDAPAFKATMGFH

SEQ ID NO: 23950 - protein, 512 aa, Arabidopsis thaliana
MGALEAERAANNATALETQSSPEDLGQPSPLRKIISVASIAAGVQFGWALQLSLLTPYIQLLGIPHKWSSYMWLCGPISGMIVQPIVGYHSDRCESRFGRRRPFIAAGVALVAVSVFLIGFAADMGHSFGDKLENKVRTRAIIIFLTGFWFLDVANNTLQGPCRAFLADLAAGDAKKTRVANACFSFFMAVGNVLGYAAGSYTNLHKMFPFTMTKACDIYCANLKTCFFLSITLLLIVTFSSLWYVKDKQWSPPQGDKEEKTSSLFFFGEIFGAVRHMKRPMVMLLIVTVINWIAWFPFILYDTDWMGREVYGGNSDGDERSKKLYDQGVQAGALGLMFNSILLGFVSLGVESIGRKMGGAKRLWGCVNFILAIGLAMTVLVTKSAEHHREIAGPLAGPSSGIKAGVFSLFTVLGIPLAITYSIPFALASIFSTNSGAGQGLSLGVLNIAICIPQMIVSFSSGPLDAQFGGGNLPSFVVGAIAAAVSGVLALTVLPSPPPDAPAMSGAMGFH

SEQ ID NO: 23951 - protein, 492 aa, Arabidopsis thaliana
MSDLQAKNDVVAVDRQSSSSLADLDGPSPLRKMISVASIAAGIQFGWALQLSLLTPYVQLLGVPHKWSSFIWLCGPVSGLLVQPSVGYFSDRCTSRFGRRRPFIATGALLVAVAVVLIGYAADFGHSMGDKIDKPVKMRAVVIFALGFWILDVANNTLQGPCRAFLGDLAAGDAKKTRTANAFFSFFMAVGNVLGYAAGSYTNLYKIFPFTMTKACDIYCANLKSCFFLSITLLLVVTIIALWYVEDKQWSPKADSDNEKTPFFGEIFGAFKVMKRPMWMLLIVTALNWIAWFPFLLYDTDWMGREVYGGDSKGDDKMKKLYNQGIHVGALGLMLNSIVLGIVSLGIEGISKKIGGAKRLWGAVNIILAVCLAMTVLVTKKAEEHRRIAGPMALPTDGIRAGALTLFALLGIPLAITFSIPFALASIISSSSGAGQGLSLGVLNMAIVIPQMIVSFGVGPIDALFGGGNLPRFVVGAIAAAISSVVAFTVLP

SEQ ID NO: 23952 - protein, 509 aa, Arabidopsis thaliana
MGALEAERAANNATALETQSSPEDLSQPSPLRKIISVASIAAGVQFGWALQLSLLTPYIQLLGIPHKWSSYMWLCGPISGMIVQPIVGYHSDRCESRFGRRRPFIAAGVALVAVSVFLIGFAADMGHSFGDKLENKVRTRAIIIFLTGFWFLDVANNTLQGPCRAFLADLAAGDAKKTRVANACFSFFMAVGNVLGYAAGSYTNLHKMFPFTMTKACDIYCANLKTCFFLSITLLLIVTFSSLWYVKDKQWSPPQGDKEEKTSSLFFFGEIFGAVRHMKRPMVMLLIVTVINWIAWFPFILYDTDWMGREVYGGNSDGDERSKKLYDQGVQAGALGLMFNSILLGFVSLGVESIGRKMGGAKRLWGCVNFILAIGLAMTVLVTKSAEHHREIAGPLAGPSSGIKAGVFSLFTVLGIPLAITYSIPFALASIFSTNSGAGQGLSLGVLNIAICIPQMIVSFSSGPLDAQFGGGNLPSFVVGAIAAAISGVLALTVLPSPPPDAPAMSGAM

SEQ ID NO: 23953 - protein, 491 aa, Arabidopsis thaliana
MSDLQANKDETTVDRQSSSSVDLDGPSPLRKMISVASIAAGIQFGWALQLSLLTPYVQLLGVPHKWPSFIWLCGPVSGLLVQPSVGYFSDRCTSRFGRRRPFIATGALLVAVSVVLIGYAADFGHSMGDKIDKPVKMRAVVIFALGFWILDVANNTLQGPCRAFLGDLAAGDAQKTRTANAFFSFFMAVGNVLGYAAGSYTNLYKIFPFTMTKACDIYCANLKSCFFLSITLLLVVTIIALWYVEDKQWSPKADSDNEKTPFFGEIFGAFKVMKRPMWMLLIVTALNWIAWFPFLLYDTDWMGREVYGGDSKGDDKMKKLYNQGIHVGALGLMLNSIVLGVMSLGIEGISRKMGGAKRLWGAVNIILAVCLAMTVLVTKKAEEHRRIAGPMALPTDGIRAGALTLFALLGIPLAITFSIPFALASIISSSSGAGQRLSLGVLNMAIVIPQMIVSFGVGPIDALFGDGNLPGFVVGAIAAAVSSIVAFTVLP

SEQ ID NO: 23954 - protein, 492 aa, Arabidopsis thaliana
MSDLQANKDAAAVNRQSSSSSADLNGPSPMRKMISVASIAAGIQFGWALQLSLLTPYVQLLGVPHKWSSFIWLCGPVSGLLVQPSVGYFSDRCKSRFGRRRPFIAMGALLVAVAVVLIGYAADFGHSMGDKVDEPVKMRAVVIFALGFWILDVANNTLQGPCRAFLGDLAAGDAKKTRTANAFFSFFMAVGNVLGYAAGSYTNLYKIFPFTMTKACDIYCANLKSCFFLSITLLLVVTIIALWYVEDKQWSPKADSDNEKTPFFGEIFGAFKVMKRPMWMLLIVTALNWIAWFPFLLYDTDWMGREVYGGDSKGDDKMKKLYNQGIHVGGLGLMLNSIVLGFMSLGIEGISRKMGGAKRLWGAVNIILAVCLAMTVLVTKKAEEHRRIAGPMALPTDGIRAGALTLFALLGIPLAITFSIPFALASIISSSSGAGQGLSLGVLNMTIVIPQMVVSFGVGPIDALFGGGNLPGFVVGAIAAAISSVVAFSVLP

SEQ ID NO: 23955 - protein, 491 aa, Arabidopsis thaliana
MSDIQAKEDAAPVDRQSSSSVVVPDEPSPLRKMISVASIAAGIQFGWALQLSLLTPYVQLLGVPHKWSSFIWLCGPISGLLVQPTVGYFSDRCKSRFGRRRPFIATGALLVALAVILIGFAADFGHTMGDKLDEAVKIRAVGFFVVGFWILDVANNTLQGPCRAFLGDLAAGDAKKTRTANAIFSFFMAVGNVLGYAAGSYTNLHKIFPFTVTKACDIYCANLKSCFIISITLLIVLTIIALWYVEDKQWSPNADSDNEKTPFFGEIFGAFKVMKRPMWMLLAVTALNWIAWFPFLLYDTDWMGREVYGGDSAGDDKMKKLYNHGIQVGSLGLMLNSIVLGVMSLVIGVISKKIGAKRLWGAVNIILAVCLAMTVLVTKKAEEHRKIAGRMALPTNAIRDGALSLFAILGIPLAITFSIPFALASIISSSSGAGQGLSLGVLNMAIVIPQMIVSFGVGPIDALFGGGNLPGFVVGAIAALISSVVALTVLP

SEQ ID NO: 23956 - protein, 202 aa, Brassica napus
MGVYETEKPTKDAAVVETQSPEDFDQPSPLRKIISVASIAAGLQFGWALQLSLLTPYVQLLGIPHKWSSLIWLCGPVSGMIVQPIVGYHSDRCTSRFGRRRPFIAAGAALVAVAVFLIGYAADIGHKMGDKLEQKSPRVRAIGIFAFGFWILDVANNTLQGPCRAFLADLSAGDAKRTRVANGFFSFFMGVGNVLGYAAGLF

SEQ ID NO: 23957 - protein, 513 aa, Brassica oleracea
MGAFETENTAKDAAALETQSSLEEFNQPSPLRKIISVSSIAAGVQFGWALQLSLLTPYVQLLGIPHKWSSLIWLCGPVSGMIVQPIVGFHSDRCTSRFGRRRPFIAAGAAMVAVAVFLIGYAADIGYKMGDKLEQTPRVRAIGIFALGFWILDVANNTLQGPCRAFLADLAAGDAKRTRVANAFFSFFMAVGNVLGYAAGSFTNLHKMFPFAMTNACDLYCANLKSCFFLSITLLLIVTVTSLWYVKDKQWSPPPVAADEEKKSVPFFGEIFGAFKVMERPMWMLLIVTALNWIAWFPFLLFDTDWMGREVYGGDSEGDARLKQIYNKGVQSGALGLMFNSIVLGFMSLGVEWIGKKVGGAKRLWGIVNFILAIGLAMTVLVTKLAADYRKVAGPYAGPSPGIRAGALSLFAVLGIPLAITFSIPFALASIFSSSSGAGQGLSLGVLNLAIVIPQMIVSLGGGPFDALFGGGNLPAFIVGAIAAAISGVLAITVLPSPPPDAPALKTGAMGFH

SEQ ID NO: 23958 - protein, 508 aa, Brassica oleracea
MEKGSNGSAALEMQTSELDQPAALRKIISVSSIAAGVQFGWALQLSLLTPYVQLLGIPHKWASLIWLCGPISGMLVQPIVGYHSDRCTSRFGRRRPFIVAGAGLVTVAVFLIGYAADIGHSMGDQLDKPPRTRAIAIFALGFWILDVANNTLQGPCRAFLADLSAGNAKKTRTANAFFSFFMAVGNVLGYAAGSYKNLYKVVPFTMTKSCDLYCANLKTCFFLSITLLLLVTFMSLCYVTEKPWTPEPTADGKPSSVPFFGEIFGAFKELKRPMWMLLIVTALNWIAWFPFLLFDTDWMGREVYGGNSDATASVASKKLYNDGVRAGALGLMLNAIVLGFMSLGVEWVGRKMGGAKRLWGAVNFILAICLAMTVVVTKQAENHRRDHGGAKTGPPGNVTAGALTLFAVLGIPQAITFSIPFALASIFSTNSGAGQGLSLGVLNLAIVVPQMVVSVGGGPFDELFHGGNIPAFVLGAIAAAVSGILALTVLPSPPPDAPAFKTGAMGFH

SEQ ID NO: 23959 - protein, 119 aa, Penicillium marneffei
PFLLSLGMSKALLAIVWVAGPLTGTLVQPYIGILSDNCRIPWGKRKPFMIGGGLATIFCLMLLAWVREIIAGVLGIFGADAQSSGVKVTTLVFATIMMFCLDFAINTGMFWICLVLLHC

SEQ ID NO: 23960 - protein, 78 aa, Cicer arietinum
STHIEPLGLGQGLSMGVLNLAIVVPQIVVSLGSGPWDQIFGGGNSPAFAVAAVAALMSGLLALLAIPRTGTQKPRSRV

SEQ ID NO: 23961 - protein, 524 aa, Pisum sativum
MEPLSSTKQINNNNNNLAKPSSLHVETQPLEPSPLRKIMVVASIAAGVQFGWALQLSLLTPYVQLLGIHHTWAAYIWLCGPISGMLVQPVVGYHSDRCTSRFGRRRPFIAAGSIAVAIAVFLIGYAADLGHSFGDNLDKKVRPRAIGIFVVGFWILDVANNMLQGPCRALLGDLCAGNQRKTRNANAFFSFFMAVGNVLGYAAGAYSKLYHVFPFTKTEACNVYCANLKSCFFLSIALLTVLATAALIYVKETPLIAEKAVVTAEDGGSNGGMPCFGQLSGAFKELKRPMWILLLVTCLNWIAWFPFLLFDTDWMGKEVYGGTVGEGHAYDMGVRAGALGLMLNSVVLGATSLGVDILARGVGGVKRLWGIVNFLLAICLGLTVLVTKLAQHSRQYAPGTGGLQDPLPPSGGIKAGALTLFSVLGIPLAITYSIPFALASIFSSTSGAGQGLSLGVLNLAIVIPQMFVSVLSGPWDALFGGGNLPAFVVGAVAALASGILSMILLPSPPPDMAKSVSATGGGFH

SEQ ID NO: 23962 - protein, 523 aa, Vicia faba
MEPLSSTKQINNNNNLAKPSSLHVETQPLEPSPLRKIMVVASIAAGVQFGWALQLSLLTPYVQLLGIHHTWAAYIWLCGPISGMLVQPIVGYHSDRCTSRFGRRRPFIAAGSIAVAIAVFLIGYAADLGHSFGDSLDQKVRPRAIGIFVVGFWILDVANNMLQGPCRALLGDLCAGNQRKTRNANAFFSFFMAVGNVLGYAAGAYSKLYHVFPFTKTKACNVYCANLKSCFFLSIALLTVLATSALIYVKETALTPEKTVVTTEDGGSSGGMPCFGQLSGAFKELKRPMWILLLVTCLNWIAWFPFLLFDTDWMGKEVYGGTVGEGHAYDMGVREGALGLMLNSVVLGATSLGVDILARGVGGVKRLWGIVNFLLAICLGLTVLVTKLAQHSRQYAPGTGALGDPLPPSEGIKAGALTLFSVLGVPLAITYSIPFALASIFSSTSGAGQGLSLGVLNLAIVIPQMFVSVLSGPWDALFGGGNLPAFVVGAVAALASGILSIILLPSPPPDMAKSVSATGGGFH

SEQ ID NO: 23963 - protein, 533 aa, Ricinus communis
MQSSTSKENKQPPSSQPHPPPLMVAGAAEPNSSPLRKVVMVASIAAGIQFGWALQLSLLTPYVQLLGIPHTWAAFIWLCGPISGMLVQPIVGYHSDRCTSRFGRRRPFIASGAAFVAIAVFLIGYAADLGHLSGDSLDKSPKTRAIAIFVVGFWILDVANNMLQGPCRALLADLSGTSQKKTRTANALFSFFMAVGNVLGYAAGAYTHLYKLFPFTKTTACDVYCANLKSCFFISIVLLLSLTVLALSYVKEKPWSPDQAVDNAEDDTASQASSSAQPMPFFGEILGAFKNLKRPMWILLLVTCLNWIAWFPFLLFDTDWMGREVYGGDSSGSAEQLKLYDRGVRAGALGLMLNSVVLGFTSLGVEVLARGVGGVKRLWGIVNFVLAVCLAMTVLVTKQAESTRRFATVSGGAKVPLPPPSGVKAGALALFAVMGVPQAITYSIPFALASIFSNTSGAGQGLSLGVLNLSIVIPQMIVSVAAGPWDALFGGGNLPAFVVGAVAALASGIFALTMLPSPQPDMPSAKALTAAFH

SEQ ID NO: 23964 - protein, 334 aa, Ricinus communis
EGVQFGWALQLSLLTPYVQLLGIPHTWAAFIWLCGPISGMLVQPIVGYHSDRCTSRFGRRRPFIASGAAFVAIAVFLIGYAADLGHLSGDSLDKSPKTRAIAIFVVGFWILDVANNMLQGPCRALLADLSGTSQKKTRTANALFSFFMAVGNVLGYAAGAYTHLYKLFPFTKTTACDVYCANLKSCFFISIVLLLSLTVLALSYVKEKPWSPDQAVDNAEDDTASQASSSAQPMPFFGEILGAFKNLKRPMWILLLVTCLNWIAWFPFLLFDTDWMGREVYGGDSSGSAEQLKLYDRGVRAGALGLMLNSVVLGFTSLGVEVLARGVGGANRFW

SEQ ID NO: 23965 - protein, 306 aa, Ricinus communis
MVASIAAGIQFGWALQLSLLTPYVQLLGIPHTWAAFIWLCGPISGMLVQPIVGYHSDRCTSRFGRRRPFIASGAAFVAIAVFLIGYAADLGHLSGDSLDKSPKTRAIAIFVVGFWILDVANNMLQGPCRALLADLSGTSQKKTRTANALFSFFMAVGNVLGYAAGAYTHLYKLFPFTKTTACDVYCANLKSCFFISIVLLLSLTVLALSYVKEKPWSPDQAVDNAEDDTASQASSSAQPMPFFGEILGAFKNLKRPMWILLLVTCLNWIAWFPFLLFDTDWMGREVYGGDSSGSAEQLKLYDRGVR

SEQ ID NO: 23966 - protein, 530 aa, Euphorbia esula
METQLATKNPSSQPPPPPPELAAPPSSNLKKIVVVASIAAGVQFGWALQLSLLTPYVQLLGIPHTWAAFIWLCGPISGMLVQPIVGYHSDRCTSRFGRRRPFIAAGAASVAVAVFLIGYAADLGHMSGDSIGKSPKIRAIAIFVVGFWILDVANNMLQGPCRALLADLSGTSQKKTRLANALFSFFMAVGNILGYAAGAYTHLYKIAPFTLTKACDVYCANLKTCFFISIALLLVLTVIALTYVKEKQWSPEIAKTVAGVDGDDEDGPVEAAPLPFFGEIFAALKNLQRPMRILLLVTCLNWIAWFPFLLFDTDWMGREVYGGSSDSSATAGESKLYDRGVRAGALGLMLNSVVLGFTSLGVELMARKLGKVKRLWGIVNFLLAICLALTILITKLAESGRHYPTVNGVVSTTPSPPSSGIKAGALTLFAVMGIPQAITYSVPFALASIFSNDSGAGQGLSLGVLNLSIVIPQMLVSVASGPFDALFGGGNLPAFVVGAVAAAASGVLALTYLPSPPPDLPAKALTVGFH

SEQ ID NO: 23967 - protein, 538 aa, Oryza sativa (indica cultivar-group)
MARGSGAGGGGGGGGGGLELSVGVGGGGGARGGGGGEAAAAVETAAPISLGRLILSGMVAGGVQYGWALQLSLLTPYVQTLGLSHALTSFMWLCGPIAGMVVQPCVGLYSDRCTSKWGRRRPYILTGCVLICLAVVVIGFSADIGYAMGDTKEDCSVYHGSRWHAAIVYVLGFWLLDFSNNTVQGPARALMADLSGRHGPGTANSIFCSWMAMGNILGYSSGSTNNWHKWFPFLKTRACCEACANLKGAFLVAVIFLSLCLVITLIFAKEVPFKGNAALPTKSNEPAEPEGTGPLAVLKGFRNLPTGMPSVLIVTGLTWLSWFPFILYDTDWMGREIYHGDPKGTDPQIEAFNQGVRAGAFGLLLNSIVLGFSSFLIEPMCRKVGPRVVWVTSNFLVCIAMAATALISFWSLKDFHGTVQKAITADKSIKAVCLVLFAFLGVPLAVLYSVPFAVTAQLAATRGGGQGLCTGVLNISIVIPQVVIALGAGPWDELFGKGNIPAFGLASGFALIGGVAGIFLLPKISKRQFRSVSMGGGH

SEQ ID NO: 23968 - protein, 506 aa, Oryza sativa (indica cultivar-group)
MAVDMELDGGGDGKGKAPPQISLSGLFLACMVAGGVQYGWALQLSLLTPYIQTLGIPHALTSVMWLCGPIAGLIVQPCVGLYSDKCTSSLGRRRPFILTGCIIICISVIVIGFSSDIGYALGDATEDCKVYRGPRYHAAAAFILGFWLLDFSNNTVQGPARALMADLSGRHGPSAANAIFCSWMALGNILGYSSGSTNDWHKWFPFLMTRACCEACANLKAAFLVAVVFLGLSTAVTMVFAREVALDPVAAAKRNEGEASGPLAVFKGMKNLPVGMPSVLIVTGLTWLSWFPFILFDTDWMGREIYHGRPDGSPAEVTAFQEGVRQGAFGLLLNSIVLGISSFLIEPMCRRLGARAVWVMSSAVVCVAMAAVSVLSAWSLGDFGGSVQDAARAPAEEGGVRASALALFVFLGLPFAVLCSVPFAVTAQLTASRGGGQGLCTGVLNISIVVPQMAIALGAGPWDELFGEGNIPAFAMASVFAAAAAAAGVVLLPKVSVRSVSMAGGH

SEQ ID NO: 23969 - protein, 515 aa, Daucus carota
MENGTKELNKPQPPSSAAMQLQTPVQKIPTATWKLVLVAAIAAGVQFGWALQLSLLTPYVQLLGIPHKWAAYIWLCGPISGMLVQPIVGYYSDHCQSSFGRRRPFIASGAGCVAISVILIGFAADIGYKAGDDMSKTLKPRAVTVFVIGFWILDVANNMLQGPCRALLADLCSGDTRRMRSANAFYSFFMAVGNILGYAAGSYNNLYKLFPFSKTHACDLYCANLKSCFIISIALLIIITVVALSVVREKQWSPDDADAADEPPSSGKIPVFGELLGALKDLPRPMLLLLIVTCLNWIAWFPFILFDTDWMGREIYGGTAGKGKLYDQGVRAGSLGLLLNSVVLGLTSIAVEYLVRGVGGVKILWGVVNFILAIGLVMTVVVSKVAQHQREHSANGQLLPPSAGVKAGALSLFSILGIPLSITYSIPFALASIYSSGSGAGQGLSLGVLNLAIVVPQMIVSVLAGPFDSLFGGGNLPAFVVGAISAAISGVLAIVLLPKPSKDAASKLSLSGTYH

SEQ ID NO: 23970 - protein, 515 aa, Daucus carota
MENGTKELNKPQPPSSAAMQLQTPVQKIPTATWKLVLVAAIAAGVQFGWALQLSLLTPYVQLLGIPHKWAAYIWLCGPISGMLVQPIVGYYSDHCQSSFGRRRPFIASGAGCVAISVILIGFAADISYKAGDDMSKTLKPRAVTVFVIGFWILDVANNMLQGPCRALLADLCSGDTRRMRSANAFYSFFMAVGNILGYAAGSYNNLYKLFPFSKTHACDLYCANLKSCFIISIALLIIITVVALSVVRENSGPPDDADAAEEPPSSGKIPVFGELLGALKDLPRPMLLLLIVTCLNWIAWFPFILFDTDWMGREIYGGTAGQGKLYDQGVRAGALGLLLNSVVLGLTSIAVEYLVRGVGGVKILWGFVNFILAIGLVMTVVVSKVAQHQREHSANGQLLPPSAGVKAGALSLFSILGIPLSITYSIPFALASIYSSGSGAGQGLSLGVLNLAIVVPQMIVSVLAGPFDSLFGGGNLPAFVVGAISAAISGVLAIVLLPKPSKDAASKLSLSGTYH

SEQ ID NO: 23971 - protein, 515 aa, Daucus carota
MENGTKELNKPQPPSSAAMQLQTPVQKIPTATWKLVLVAAIAAGVQFGWALQLSLLTPYVQLLGIPHKWAAYIWLCGPISGMLVQPIVGYYSDHCQSSFGRRRPFIASGAGCVAISVILIGFAADISYKAGDDMSKTLKPRAVTVFVIGFWILDVANNMLQGPCRALLADLCSGDTRRMRSANAFYSFFMAVGNILGYAAGSYNNLYKLFPFSKTHACDLYCANLKSCFIISIALLIIITVVALSVVRENSGPPDDADAAEEPPSSGKIPVFGELLGALKDLPRPMLLLLIVTCLNWIAWFPFILFDTDWMGREIYGGTAGKGKLYDQGVRAGALGLLLNSVVLGLTSIAVEYLVRGVGGVKILWGFVNFILAIGLVMTVVVSKVAQHQREHSANGQLLPPSAGVKAGALSLFSILGIPLSITYSIPFALASIYSSGSGAGQGLSLGVLNLAIVVPQMIVSVLAGPFDSLFGGGNLPAFVVGAISAAISGVLAIVLLPKPSKDAASKLSLSGTYH

SEQ ID NO: 23972 - protein, 512 aa, Apium graveolens
MENGTKELNKQPPPSAAMQVQTSPPKLPIATWKLILVAAIAAGVQFGWALQLSLLTPYVQLLGIPHKWAAYIWLCGPISGMLVQPIVGYYSDRCQSSFGRRRPFIASGAGCVAISVILIGFAADIGYKAGDDMTKTLKPRAVTGFVIGFWILDVANNMLQGPCRALLADLCNGDTRRMRSANAFYSFFMAVGNILGYAAGSYNNLYKLFPFSKTHACDLYCANLKSCFIISIVLLIFITVLALTVVREKQWSPDEADEEPPSSGKIPVFGELFGALKDLPRPMLMLLVVTCLNWIAWFPFILFDTDWMGREIYGGTAGQGKLYDQGVRVGSLGLLLNSVVLGLTSIAVEYLVRGVGGVKILWGLVNFLLAIGLVMTVVVSKVAQHQRQHGANGQLLPPSAGVKAGALSLFSILGIPLSITFSIPFALASIYSSGSGAGQGLSLGVLNLAIVVPQMIVSVLAGPFDSLFGGGNLPAFVVGAISAAISGVLAIVLLPKPSKDAAAKLTLSGPYH

SEQ ID NO: 23973 - protein, 512 aa, Apium graveolens
MENGTKELNKQPPPSAAMQVQTSPPKLPIATWKLILVAAIAAGVQFGWALQLSLLTPYVQLLGIPHKWAAYIWLCGPISGMLVQPIVGYYSDRCQSSFGRRRPFIASGAGCVAISVILIGFAADIGYKAGDDMNKTLKPRAVTVFVIGFWILDVANNMLQGPCRALLADLCNGDTRRMRSANALYRFFMAVGNILGNAAGSYNNLYKLFPFSKTHACDLYCANLKSCFIISIVLLIFITVLALTVVREKQWSPDEADEEPPSSGKIPVFGELLRALKDLPRPMLMLLAVTCLNWIAWFPFILFDTDWMGREIYGGTAGQGKLYDQGVRVGSLGLLLNSVVLGLTSIAVEYLVRGVGGVKILWGLVNFLLAIGLVMTVVVSKVAQHQRQHGANGQLLPPSAGVKAGALSLFSILGIPLSITFSIPFALASIYSSGSGAGQGLSLGVLNLAIVVPQMIVSVLAGPFDSLFGGGNLPAFVVGAISAAISGVLAIVLLPKPCKDAAAKLTLSGPYH

SEQ ID NO: 23974 - protein, 157 aa, Apium graveolens
ILGFWILDVANNMMQGPCRALLADMSGHNHKKTRTANSYYSFFMAVGNVLGYAAGSYTDLYKVFPFTKTKACDVYCVNLKTCFIFAIILLLVLTTAAMTLVKERPLVLSHQSNADQDEEDEEEVSMPFFGQILSALGNLSRSMWMLIVVTSLNWIAW

SEQ ID NO: 23975 - protein, 429 aa, Lycopersicon esculentum
MENGTKGKLTVSSSLQIEQPLPPSKLWKIIVVASIAAGVQFGWALQLSLLTPYVQLLGIPHRFASFIWLCGPISGMIVQPVVGYYSDNCSSRFGRRRPFIAAGAALVTIAVFLIGFAADLGHASGDPLGKGSKPRAIAVFVVGFWILDVANNMLQGPCRALLADLSGGKSGKMRTANAFFSFFKAVGNILGYAAGSYSRLFKVFPFSKTKACDMYRANLKSCFFIAIFLLLSLTTLALTLVRENELPEKEELEIDEKLSGAGKSKVPFFGEIFGALKDLPRPMWILLLVTCLNWIAWFPFFLYDTDWMAKEVFGGQVGDAKLYDLGVRAGALGLLLQSVVLGFMSLGVEFLGKKIGGAKRLWGILNFVLAICLAMTILVTKMAEKSRGHDAAGTLMGPTPGVKIGALLLFAALGIPLAVTFSIPFALAS

SEQ ID NO: 23976 - protein, 428 aa, Lycopersicon esculentum
MENGTKGKLTVSSSLQIEQPLPPSKLWKIIVVASIAAGVQFGWALQLSLLTPYVQLLGIPHRFASFIWLCGPISGMIVQPVVGYYSDNCSSRFGRRRPFIAAGAALVTIAVFLIGFAADLGHASGDPLGKGSKPRAIAVFVVGFWILDVANNMLQGPCRALLADLSGGKSGKMRTANAFFSFFKAVGNILGYAAGSYSRLFKVFPFSKTKACDMYRANLKSCFFIAIFLLLSLTTLALTLVRENELPEKEELEIDEKLSGAGKSKVPFFGEIFGALKDLPRPMWILLLVTCLNWIAWFPFFLYDTDWMAKEVFGGQVGDAKLYDLGVRAGALGLLLQSVVLGFMSLGVEFLGKKIGGAKRLWGILNFVLAICLAMTILVTKMAEKSRGHDAAGTLMGPTPGVKIGALLLFAALGIPLAVTFSIPFALA

SEQ ID NO: 23977 - protein, 507 aa, Nicotiana tabacum
MENGTKKLNVSSLAVEQPLPKSKLWKIIMVASIAAGVQFGWALQLSLLTPYVQLLGIPHKFASFIWLCGPISGMIVQPVVGYYSDNCSSRFGRRRGFIAAGAALVTIAVFLIGFAADLGHATGDPLGKGSKPRAIAVFVVGFWILDVANNMLQGPCRALLADLSGGKARMRTSNAFFSFFMAVGNVLGYAAGSYSRLCKIFPFSKTPACDIYCANLKSCFFIAVFLLLSLTILALTVVRENELPEKDEHEIDEKAGARKSKVPFFGEIFGALKDLPRPMWILLLVTSLNWIARFPFFLYDTDWMAKEVYGGKVGDGRLYDLGVHAGALGLLLNSVVLGFMSLSVEFLGKKIGGVKRLWGILNFVLAVCMALTVLVTKMAEKSRQYDAHGTLMAPTSGVKIGALTLFAVLGIPLAVTFSVPFALASIFSSNAGSGQGLSLGVLNLAIVVPQMLVSIAGGPWDDLFGGGNLPGFIVGAVAAAASGILALTMLPSPPADAKPATTMGGFH

SEQ ID NO: 23978 - protein, 521 aa, Nicotiana tabacum
MESGSMEMKVQQPYLAVPVLPPRWKIVMVASIAAGVQFGWALQLSLLTPYLQLLGIPHRYASIIWLCGPISGMIVQPAVGYLSDNLSSTFGRRRPFIAAGSSLVAVAVIFIGFAADIGHAFGDPLDTKTKPLGIITFIVGFWYLDVANNMLQGPCRAFLADLSGGKACRIRTGQSCYAFFMAVGSILGNAAGSYSHLYTIFPFTKTEACGVQCANLKSCFLISVVLLLTLTTLALTAVDEKVLPQKDHFINSEYLGSSGKKGGLLFFGEMFEALKHLPRSVWILLMVTAVNWIAWFPFTLYGTDWMGKEVYGGRVRDGNLYNKGVHAGVFGLLLSSVVLCLMSLGVECVGKWLGGAKRLWGIVNFILAICLAMTVFVTKMADKSRRYDGDGELLPPDQGVKISALLLNAVTGIPLAVLYSIPFAMASIYSSNVGAGQGLSQGVINLAIVVPQTLVSISGRPFDALFGGGNLPAFVAGAVAAAVSGILALTLLPSPTEPCQTYPHFRRCFPMTKYWTSQNKF

SEQ ID NO: 23979 - protein, 300 aa, Nicotiana tabacum
LCGPISGMIVQPVVGYYSDNCSSRFGRRRPFIAAGAALVTIAVFLIGFAADLGHASGDPLGKGSKPRAIAVFVVGFWILDVANNMLQGPCRALLADLSGGKAGRMRTSNAFFSFFMAVGNVLGYAAGSYSRLYKIFPFSKTPACDIYCANLKSCFFIAVFLLLSLTILALTVVRENELPEKDEHEIDEKAGGGGKSKVPFFGEIFGALKDLPRPMWILLLVTCLNWIAWFPFFLYVTDWMAKEVYGGKVGDGRLYDLGVHAGALGLLLNSVVLGFMSLSVEFLGKKIGGVKRLWGILNFV

SEQ ID NO: 23980 - protein, 516 aa, Solanum tuberosum
MENGTKREGLGKLTVSSSLQVEQPLAPSKLWKIIVVASIAAGVQFGWALQLSLLTPYVQLLGIPHKFASFIWLCGPISGMIVQPVVGYYSDNCSSRFGRRRPFIAAGAALVMIAVFLIGFAADLGHASGDTLGKGFKPRAIAVFVVGFWILDVANNMLQGPCRALLADLSGGKSGRMRTANAFFSFFMAVGNILGYAAGSYSHLFKVFPFSKTKACDMYCANLKSCFFIAIFLLLSLTTIALTLVRENELPEKDEQEIDEKLAGAGKSKVPFFGEIFGALKELPRPMWILLLVTCLNWIAWFPFFLYDTDWMAKEVFGGQVGDARLYDLGVRAGAMGLLLQSVVLGFMSLGVEFLGKKIGGAKRLWGILNFVLAICLAMTILVTKMAEKSRQHDPAGTLMGPTPGVKIGALLLFAALGIPLAATFSIPFALASIFSSNRGSGQGLSLGVLNLAIVVPQMLVSLVGGPWDDLFGGGNLPGFVVGAVAAAASAVLALTMLPSPPADAKPAVAMGLSIK

SEQ ID NO: 23981 - protein, 754 aa, Dictyostelium discoideum
MTYNNSNSKNKIKNKYYKQEDETINEDENDIKEEEEEEEEKEEKEGNINNNNNSNKINIEKDTNFIDKTNLGNGEGDSGGGGGDSGGGCGGGGNDDGKEKKNKLKANEHAPKILSSYSISSSCGNPHHSETSTTPKQPMTTTTTTTTASTANSLSSLNTSSSLGASSSGILNTSNENTPIIGGVLKIDNEILLNSGHKKTLPLFNLICLTICFLGVQFGWALQIAFSTPLFLELGVEQKWVSYIWLAGPISGLIVQPLVGVITDRSECRFGRRKPFILIGSVFISIGLVLISNAETFGSYFGDSEQKKSIAISIAIVGFWILDLSNNAVQAPCRALLVDIAAPSQQSLGSSLFSLMLGTGNLLGYMMGSIDLVRMVPFMKTDTRALFTLSIMVLLFCVVMTLGFVTEEQYIRVNEDQSVENPLKTMFKGIVKMPTYLQRLCAVQFFSWIGWFSFVLFITTWVGVNVFGGDPNAPEYSDSRILFQDGVRWGSLSLTISSGITIAVSLLIPFLVKFIDMKYIYIGGNLLQCIFFALFYFVESKIGSLLLIASTGIPWAIVMILPFSIVGMGVEDNESSGLNIGTLNIFVVVPQMVVSLGIGLILDLSKGNVVYSLLTGSVASFFATLFCFRIIIPKHHGHPIGDIEEIHFNIENNNSGNKYSPMYKSDNNNNNNTNNNNNNNNNNNNNNNNNNNNNNNNFNNNNNNNSDNNNNNQSIINNNKIDNNKSPNQKDIEPILNLNDSYQVNQSQQSYSNY

SEQ ID NO: 23982 - protein, 506 aa, Oryza sativa
MAVDMELDGGGDGKGKAPPQISLSGLFLACMVAGGVQYGWALQLSLLTPYVQTLGIPHALTSVMWLCGPIAGLIVQPCVGLYSDKCTSSLGRRRPFILTGCIIICISVIVIGFSSDIGYALGDTTEDCKVYRGPRYHAAAAFILGFWLLDFSNNTVQGPARALMADLSGRHGPSAANAIFCSWMALGNILGYSSGSTNDWHKWFPFLMTRACCEACANLKAAFLVAVVFLGLSTAVTMVFAREVALDPVAAAKRNEGEASGLLAVFKGMKNLPVGMPSVLIVTGLTWLSWFPFILFDTDWMGREIYHGRPDGSPAEVTAFQEGVRQGAFGLLLNSIVLGISSFLIEPMCRRLGARAVWVMSSAVVCVAMAAVSVLSAWSLGDFGGSVQDAARAPAEEGGVRASALALFVFLGLPFAVLCSVPFAVTAQLAASRGGGQGLCTGVLNISIVVPQMAIALGAGPWDELFGEGNIPAFAMASVFAAAAAAAGVVLLPKVSVRSVSMAGGH

SEQ ID NO: 23983 - protein, 537 aa, Oryza sativa
MARGSGAGGGGGGGGGGLELSVGVGGGGARGGGGGEAAAAVETAAPISLGRLILSGMVAGGVQYGWALQLSLLTPYVQTLGLSHALTSFMWLCGPIAGMVVQPCVGLYSDRCTSKWGRRRPYILTGCVLICLAVVVIGFSADIGYAMGDTKEDCSVYHGSRWHAAIVYVLGFWLLDFSNNTVQGPARALMADLSGRHGPGTANSIFCSWMAMGNILGYSSGSTNNWHKWFPFLKTRACCEACANLKGAFLVAVIFLSLCLVITLIFAKEVPFKGNAALPTKSNEPAEPEGTGPLAVLKGFRNLPTGMPSVLIVTGLTWLSWFPFILYDTDWMGREIYHGDPKGTDPQIEAFNQGVRAGAFGLLLNSIVLGFSSFLIEPMCRKVGPRVVWVTSNFLVCIAMAATALISFWSLKDFHGTVQKAITADKSIKAVCLVLFAFLGVPLAVLYSVPFAVTAQLAATRGGGQGLCTGVLNISIVIPQVVIALGAGPWDELFGKGNIPAFGLASGFALIGGVAGIFLLPKISKRQFWSVSMGGGH

SEQ ID NO: 23984 - protein, 539 aa, Oryza sativa
  unsure (1)..(539): unsure at all Xaa locations
MARGSGAGGGGGGGGGGLELSVGVGGGGGARGGGGGEAAAAVETAAPISLGRLILSGMVAGGVQYGWALQLSLLTPYVQTLGLSHALTSFMWLCGPIAGMVVQPCVGLYSDRCTSKWGRRRPYILTGCVLICLAVVVIGFSADIGYAMGDTKEDCSVYHGSRWHAAIVYVLGFWLLDFSNNTVQGPARALMADLSGRHGPGTANSIFCSWMAMGNILGYSSGSTNNWHKWFPFLKTRACCEACANLKGAFLVAVIFLSLCLVITLIFAKEVPFKGNAAPPNXKSNEPAEPEGTGPLAVLKGFRNLPTGMPSVLIVTGLTWLSWFPFILYDTDWIGREIYHGDPKGTDPQIEAFNQGVRAGAFGLLLNSIVLGFSSFLIEPMCRKVGPRVVWVTSNFLVCIAMAATALISFWSLKDFHGTVQKAITADKSIKAVCLVLFAFLGVPLAVLYSVPFAVTAQLAATRGGGQGLCTGVLNISIVIPQVVIALGAGPWDELFGKGNIPAFGLASGFALIGGVAGIFLLPKISKRQFRSVSMGGGH

SEQ ID NO: 23985 - protein, 342 aa, Oryza sativa
PGLQAVLTVGFSADLGRIFGDSITPGSTRLGAIIVYLVGFWLLDVGNNATQGPCRAFLADLTENDPRRTRIANAYFSLFMALGNILGYATGAYSGWYKIFPFTVTPSCSISCANLKSAFLLDIIILVVTTCITVASVQEPQSLGSDEADHPSTEQEAFLWELFGSFRYFTLPVWMVLIVTALTWIGWFPFILFDTDWMGREIYRGSPDDPSITQSYHDGVRMGSFGLMLNSVLLGFTSIVLEKLCRKWGAGLVWGVSNILMALCFVAMLVITYVAKNMDYPPSGVPPTGIVIASLVVFTILGAPLAITYSIPYAMAASRVENLGLGQGLAMGILNLAIVIPQ

SEQ ID NO: 23986 - protein, 525 aa, Oryza sativa
  unsure (1)..(525): unsure at all Xaa locations
LVLWXVSAIIKFSFFFVSXPGMSNTPNTIVYXCPVIXLQVQPCVGVWSDKCRSKYGRRRPFILAGCLMICFAVTLIGFSADLGYILGDTTEHCSTYKGSRFRAAIIFVLGFWMLDLANNTVQGPARALLADLSGPDQCNSANAIFCTWMAVGNVLGFSSGASGNWHKWFPFLMTRACCEACSNLKAAFLVAVVFLLFCMSVTLYFAEEIPLEPTDAQRLSDSAPLLNGSRDXXNNASNEPRNGALPNGHTDGSNVPANSNAEDSNSNRENVEVFNDGPGAVLVNILTSMRHLPPGMYSVLLVMALTWLSWFPFFLFDTDWMGREVYHGDPNGNLSERKAYDNGVREGAFGLLLNSVVLGIGSFLVDPLCRLMGARLVWAISNFTVFICMLATAILSWISFDLYSSKLHHIIGANKTVKNSALIVFSLLGLPLSITYSVPFSVTAELTAGTGGGQGLATGVLNLAIVVPQIVVSLGAGPWDALFGGGNVPAFALASVFSLGAGVLAVLKLPKLPNSYRSAGFHGFG

SEQ ID NO: 23987 - protein, 414 aa, Oryza sativa
  unsure (1)..(414): unsure at all Xaa locations
VQPCVGVWSDKCRSKYGRRRPFILAGCLMICFAGPARALLADLSGPDQCNSANAIFCTWMAVGNVLGFSSGASGNWHKWFPFLMTRACCEACSNLKAAFLVAVVFLLFCMSVTLYFAEEIPLEPTDAQRLSDSAPLLNGSRDXXNNASNEPRNGALPNGHTDGSNVPANSNAEXTPIQTERMSKFSXDGPGAVLVNILTSMRHLPPGMYSVLLVMALTWLSWFPFFLFDTDWMGREVYHGDPNGNLSERKAYDNGVREGAFGLLLNSVVLGIGSFLVDPLCRLMGARLVWAISNFTVFICMLATAILSWISFDLYSSKLHHIIGANKTVKNSALIVFSLLGLPLSITYSVPFSVTAELTAGTGGGQGLATGVLNLAIVVPQELVSSRSLSYPSCQTLTDLLGSMDLAEQNTSRM

SEQ ID NO: 23988 - protein, 344 aa, Oryza sativa
GLQGSSLPCSGGIHPRILAARLLQQHRAGSSSRSDGRFVRWFPFLMTRACCEACANLKAAFLVAVVFLGLSTAVTMVFAREVALDPVAAAKRNEGEASGLLAVFKGMKNLPVGMPSVLIVTGLTWLSWFPFILFDTDWMGREIYHGRPDGSPAEVTAFQEGVRQGAFGLLLNSIVLGISSFLIEPMCRRLGARAVWVMSSAVVCVAMAAVSVLSAWSLGDFGGSVQDAARAPAEEGGVRASALALFVFLGLPFAVLCSVPFAVTAQLAASRGGGQGLCTGVLNISIVVPQMAIALGAGPWDELFGEGNIPAFAMASVFAAAAAAAGVVLLPKVSVRSVSMAGGH

SEQ ID NO: 23989 - protein, 436 aa, Oryza sativa
MARGSGAGGGGGGGGGGLELSVGVGGGGGARGGGGGEAAAAVETAAPISLGRLILSGMVAGGVQYGWALQLSLLTPYVQTLGLSHALTSFMWLCGPIAGMVVVVIGFSADIGYAMGDTKEDCSVYHGSRWHAAIVYVLGFWLLDFSNNTVQIFLSLCLVITLIFAKEVPFKGNAALPTKSNEPAEPEGTGPLAVLKGFRNLPTGMPSVLIVTGLTWLSWFPFILYDTDWMGREIYHGDPKGTDPQIEAFNQGVRAATNHGLLIVQIVLGFSSFLIEPMCRKVGPRVVWVTSNFLVCIAMAATALISFWSLKDFHGTVQKAITADKSIKAVCLVLFAFLGVPLAVLYSVPFAVTAQLAATRGGGQGLCTGVLNISIVIPQVVIALGAGPWDELFGKGNIPAFGLASGFALIGGVAGIFLLPKISKRQFRSVSMGGGH

SEQ ID NO: 23990 - protein, 522 aa, Triticum aestivum
MARGGGNGEVELSVGVGGGGAGAGGADAPAVDISLGRLILAGMVAGGVQYGWALQLSLLTPYVQTLGLSHALTSFMWLCGPIAGLVVQPCVGLYSDKCTSRWGRRRPFILTGCILICIAVVVVGFSADIGAALGDSKEECSLYHGPRWHAAIVYVLGFWLLDFSNNTVQGPARALMADLSAQHGPSAANSIFCSWMALGNILGYSSGSTNNWHKWFPFLRTRACCEACANLKGAFLVAVLFLAFCLVITVIFAKEIPYKAIAPLPTKANGQVEVEPTGPLAVFKGFKNLPPGMPSVLLVTGLTWLSWFPFILYDTDWMGREIYHGDPKGTPDEANAFQAGVRAGAFGLLLNSVVLGFSSFLIEPLCKRLGPRVVWVSSNFLVCLSMAAICIISWWATQDLHGYIQHAITASKEIKIVSLALFAFLGIPLAILYSVPFAVTAQLAANRGGGQGLCTGVLNIAIVIPQVIIAVGAGPWDELFGKGNIPAFGVASAFALIGGIVGIFLLPKISRRQFRAVSGGGH

SEQ ID NO: 23991 - protein, 523 aa, Triticum aestivum
MARGGGNGEVELSVGVGGGGGGAAGGGEQPAVDISLGRLILAGMVAGGVQYGWALQLSLLTPYVQTLGLSHALTSFMWLCGPIAGLVVQPCVGLYSDKCTSRWGRRRPFILTGCILICIAVVVVGFSADIGAALGDSKEECSLYHGPRWHAAIVYVLGFWLLDFSNNTVQGPARALMADLSAQHGPSAANSIFCSWMALGNILGYSSGSTNNWHKWFPFLRTRACCEACANLKGAFLVAVLFLAFCLVITVIFAKEIPYKAIAPLPTKANGQVEVEPTGPLAVFKGFKNLPPGMPSVLLVTGLTWLSWFPFILYDTDWMGREIYHGDPKGTPDEANAFQAGVRAGAFGLLLNSVVLGFSSFLIEPLCKRLGPRVVWVSSNFLVCLSMAAICIISWWATQDLHGYIQHAITASKEIKIVSLALFAFLGIPLAILYSVPFAVTAQLAAKRGGGQGLCTGVLNIAIVIPQVIIAVGAGPWDELFGKGNIPAFGMASAFALIGGIVGIFLLPKISRRQFRAVSGGGH

SEQ ID NO: 23992 - protein, 522 aa, Triticum aestivum
MARGGGNGEVELSVGVGGGGAGAGGADAPAVDISLGRLILAGMVAGGVQYGWALQLSLLTPYVQTLGLSHALTSFMWLCGPIAGLVVQPCVGLYSDKCTSRWGRRRPFILTGYILICIAVVVVGFSADIGAALGDSKEECSLYHGPRWHAAIVYVLGFWLLDFSNNTVQGPARALMADLSAQHGPSAANSIFCSWMALGNILGYSSGSTNNWHKWFPFLRTRACCEACANLKGAFLVAVLFLAFCLVITVIFAKEIPYKAIAPLPTKANGQVEVEPTGPLAVFKGFKNLPPGMPSVLLVTGLTWLSWFPFILYDTDWMGREIYHGDPKGTPDEANAFQAGVRAGAFGLLLNSVVLGFSSFLIEPLCKRLGPRVVWVSSNFLVCLSMAAICIISWWATQDMHGYIQHAITASKEIKIVSLALFAFLGVPLAILYSVPFAVTAQLAANRGGGQGLCTGVLNIAIVIPQVIIAVGAGPWDELFGKGNIPAFGMASAFALIGGIVGIFLLPKISRRQFRAVSGGGH

SEQ ID NO: 23993 - protein, 522 aa, Triticum aestivum; identical to SEQ ID NO: 23992

SEQ ID NO: 23994 - protein, 524 aa, Triticum aestivum
  unsure (1)..(524): unsure at all Xaa locations
MARGGGNGEVELSVGVGGGGGGAAGGGEQPAVDISLGRLILAGMVAGGVQYGWALQLSLLTPYVQTLGLSHALTSFMWLCGPIAGLVVQPCVGLYSDKCTSRWGRRRPFILTGCILICIAVVVVGFSADIGAALGDSKEECSLYHGPRWHAAIVYVLGFWLLDFSNNTVQGPPRALMADLSAQHGPSAANSIFCSWMALGNILGYSSGSTNNWHKWFPFLRTRACCEACANLKGAFLVAVLFLAFCLVITVIFAKEIPYKAIAPLPTKANGQVEVEPTGPLAVFKGFKNLPPGMPSVLLVTGLTWLSWFPFILYDTDWMGREIYHGDPKGTPDEANAFQAGVRAGAFGLLLNSVVLGFSSFLIEPLCKRLGPRVVWVSSNFLVCLSMAAICIISWWATQDLHGYIQHAITASKEIKIVFLALFAFLGIPXLAILVSGPFAVTAQLAAKRGGGQGLCTGVLNIAIVIPQVIIAVGAGPWDELFGKGNIPAFGMASAFALIGGIVGIFLLPKISRRQFRAVSGGGH

SEQ ID NO: 23995 - protein, 523 aa, Triticum aestivum
  unsure (1)..(523): unsure at all Xaa locations
MERGARNGQVELGVAGGGRSSGGRGGGEVLAGDVSLPRLALAGTAGCGVRSGWAAEPALPTPDVRTLARTYALTDFMWLSGPLAGXMTDPCVGFYSDKRTSRWGGLRPFILTGCILTCILVVVGGFSADIGAVLGDSKEGCSLYHGPPWHILIVYVLGFWLLDFSXTVQGPARARMADGSXLSAQHGPXNSIFCSWMALGNILGYSSGSTNNWHKWFPFLRTRACCEACANLKGAFLVAVLFLAFCLVITVIFAKEIPYKAIAPLPTKANGQVEVEPTGPLAVFKGFKNLPPGMPSVLLVTGLTWLSWFPFILYDTDWMGREIYHGDPKGTPDEANAFQAGVRAGAFGLLLNSVVLGFSSFLIEPLCKRLGPRVVWVSSNFLVCLSMAAICIISWWATQDLHGYIQHAITASKEIKIVSLALFAFLGIPLAILYSVPFAVTAQLAAKRGGGQGLCTGVLNIAIVIPQVIIAVGAGPWDELFGKGNIPAFGMASAFALIGGIVGIFLLPKISRRQFRAVSGGGH

SEQ ID NO: 23996 - protein, 363 aa, Triticum aestivum
  unsure (1)..(363): unsure at all Xaa locations
XTLLQLPLLYASNSATXSPLRSISAGLAENDPRRTRIANAYFSLFMALGNILGYATGAYNGRSRGFPFTITESCSVSCANLKSAFLLDIIILAITTYVSVVTVQDNPTFGSDEAAPPSSHEEEAFLFELFGSFKYFTMPVWMVLIVTSLTWIGWFPFILFDTDWMGREIYRGSPEIVADTQKYHDGVRMGSFGLMLNSVVLGITSIGMEKLCRKWGAGLVWGVSNIIMALCFVAMLIITYVAQNLDYGPSGAPPTGIVAASLIVFTILGAPLSVTYSIPYAMAASRVENLGLGQGLAMGILNLSIVIPQIIVSLGGGPWDQLFGGGNAPSFWVAAAASFVGGLVAILGLPRARLGPKKKTTQR

SEQ ID NO: 23997 - protein, 162 aa, Triticum aestivum
  unsure (1)..(162): unsure at all Xaa locations
DSDEGWYKIFPFTVTPSCSISCANLKSAFLLDIIILVVTTCITVASVQEPQSLGSDEADHPSTEQEAFLWELFGSFRYFTLPVWMVLIVTALTWIGWFPFILFDTDWMGREIYRGSPDDPSITQSYHDGVRMGSFGLMLNSVLLGFTSIVLEKLCRKWGAGX

SEQ ID NO: 23998 - protein, 133 aa, Triticum aestivum
  unsure (1)..(133): unsure at all Xaa locations
MPPRRPNTGGGGGTSSAAPPPPPRKVPLRSLLRAASVACGVQFGWALQLSLLTPYVQELGIPHAFASLVWLCGPLSGLLVQPLVGHLSDRIAPANSPLGRRRPFIAAGAASIAFSVLTVGFSGDLGRLFGDNX

SEQ ID NO: 23999 - protein, 512 aa, Zea mays
  unsure (1)..(512): unsure at all Xaa locations
MEAPSLTKPNDPTKPSNTSSTLSLEGGPGEASPLRKMFAVASIAAGIQFGWALQLSLLTPYVQLLGVPHAAASFIWLCGPISGLVVQPIVGYYSDHCTSRFGRRRPFILGGALAVAIAVFLIGYAADIGHSAGDDITKKTRPRAVGVFVIGFWILDVANNMLQGPCRAFLADLAAGDQQKTRIANGFFSFFMAVGNVLGYAAGSYSGLHKIFPFTETKACDVFCANLKSCFFFSILLLLFLATVALLYVKDKQVEAIPLDDATQPSCFFQLFGALKELKRPMWMLMLVTAVNWVGWFPYFLFDTDWMGREVYGGTAGEXXAYAKGVRVGSLGLMVNAVVLGFMSLAVEPLGKMVGGVKRLWAIVNFILAIGFGMTVVITKVAEHQRRMNPAAVGHPSEGVVVGSMVFFGVLGVPLXITFSVPFALASIYCSASGAGQGLSLGVLNLAIVVPQMVVSALSGPWDSLFGGGNLPAFMVGAAAAALSAIMAIVLLPTPKPADEAKASSMMAGGFH

SEQ ID NO: 24000 - protein, 566 aa, Pneumocystis carinii
MIGLYAHVNASKDHFDDVINASPPLEEPQEPPLRGTLYLLFLTLVLGGLQLTCKSRKIFILYYIREGTPYLLSLGLTKHYTSFVWIAAPLTGIIIQPLIGFFSDRSRSKFGRRRPFLVVGTLCVVISLIGLAYFKDIAFFFFSGHEKVAKNMTIIVSIIIVYLLDFSINIVQASSRALIIDMVPMVQQDLANAWASRMIGIFNVVGYLNGYLNLPKIAPALGNTEFKALSVIGSIVLIVCMAVTFFVAKEKRYFMESLFNFFKTIFSTIITLPSEILWICIIQFFAWIELISMVFKVSDSFLCKIFFGTTYVAEIYAEKYCNKYLKYPDHLYTKEKEYLLIEEATRYGSFAFCAFFYYFFIRNIFLSFIFFMDFWSFYFYFMHAFNHTSKINHFFFPLFVSGKKLFKYIFRLKFYNILQNINIQFLWTFGHFIFTLCMLSTILVKSITQATIIIALCGLSWAITLWAPFSLIAIQLSSNNQLHRSGTILGVHNIFITVPQVLSIIMVGIIFKLTGYKKFEDIIKCNDNMDYSFIWIFQISGISALIAMYLSFKIYTNDPSYERNKI

SEQ ID NO: 24001 - protein, 458 aa, Novosphingobium aromaticivorans
MNGINANRPHLPLARILEMNLGFLGLQFSFGLQQGNMGPIYSYLGADESQLPMLQLAGPITGLLVQPIIGAMSDRTASRWGRRTPYFLIGAVLCAFGLFFMPLSSSILMAMSLLWILDAGNNITMEPYRAYVSDRLNPEQRQAGFLSQSAFTGLAQMLAFLTPSLLVGLGMNQDWVDSHGIPYTVRIVFMIGAVLSLSTILWSVLRVPELPLTPQERAHIQAQPKGAWATLREIGEAIADMPVAMRKLGLMSLFQWVGMSGYWTYAVYSISRTVYGTSDVHSSAFHTAVLTNGEVAAFYNAISFVTAFAMVPLVRRLGPGPLHALCLFAGGVGMFLLPNVTDKALLFLPAIGIGLAWGSIMGNPYAILTNSIPPQRTGVYMGIFNMMIVIPMLIFAVVMSRLDLGFVSLGFDAYKQVLGGDPRNMLMFCGASLVLAGFSVLWVREGRAGAMPQSAVPA

SEQ ID NO: 24002 - protein, 553 aa, Schizosaccharomyces pombe
MSVDENQLENGQLLSSENEASSPFKESIPSRSSLYLIALTVSLLGVQLTWSVELGYGTPYLFSLGLRKEWTSIIWIAGPLTGILIQPIAGILSDRVNSRIGRRRPFMLCASLLGTFSLFLMGWAPDICLFIFSNEVLMKRVTIVLATISIYLLDVAVNVVMASTRSLIVDSVRSDQQHEANSWAGRMIGVGNVLGYLLGYLPLYRIFSFLNFTQLQVFCVLASISLVLTVTITTIFVSERRFPPVEHEKSVAGEIFEFFTTMRQSITALPFTLKRICFVQFFAYFGWFPFLFYITTYVGILYLRHAPKGHEEDWDMATRQGSFALLLFAIISLAANTALPLLLEDTEDDEEDESSDASNNEYNIQERNDLGNIRTGTNTPRLGNLSETTSFRSENEPSRRRLLPSSRSIMTTISSKVQIKGLTLPILWLSSHVLFGVCMLSTIFLQTSWQAQAMVAICGLSWACTLWIPYSLFSSEIGKLGLRESSGKMIGVHNVFISAPQVLSTIIATIVFIQSEGSHRDIADNSIAWVLRIGGISAFLAAYQCRHLLPINF

SEQ ID NO: 24003 - protein, 132 aa, Schizosaccharomyces pombe
YLIALTVSLLGVQLTWSVELGYGTPYLFSLGLRKEWTSIIWIAGPLTGILIQPIAGILSDRVNSRIGRRRPFMLCASLLGTFSLFLMGWAPDICLFIFSNEVLMKRVTIVLATISIYLLDVAVNVVMASTRS

SEQ ID NO: 24004 - protein, 188 aa, Brassica rapa subsp. pekinensis
AGGVQFGWALQLSLLTPYVQELGIPHAWASVIWLCGPLSGLFVQPLVGHSSDRCTSKYGRRRPFIVAGAVAISISVMVIGHAADIGWAFGDREGKIKPRAIVAFVLGFWILDVANNMTQGPCRALLADLTGKVPDFSVDWVKGSKFGILVIIHSHAKHGNAQICDFGYNLGYWSIAIKRSLLCFWSVA

SEQ ID NO: 24005 - protein, 637 aa, Neurospora crassa
MTSSLAEHPDRARPAGNEGHQQQSEQPKSRREEPASRLSTGRRDGASEDTNQQFLVGEQSPLLSPVDNQDGSSSDQGADSADEFQTTKSVWYMILLTISIGGLQIAWSVEMSNGSPYLLSLGISKSLMALVWIAGPLSGTLVQPYVGMMSDNCRIRWGKRKPFMLGGAAATILSLMFLAWTREIVTGILGLFGADPQSESVKLCIICTAVLWIYILDFAINTVQAAIRAFIVDCAPTHQQEMANAMASSLALGTTVLMTCLFIKERDPRLEGPPAKDKPGVVAFFKKIFTSIKRLPPQTKKVCQVQFCAWIGFFPMLFYTSSYIGEIYAEPYLEENPNMTDKELDDLYERATQVGTFALLIFAITSLATNIFLPFFIAPTYDQSMVTAVAPGEAPAVVIKDYEPEQRSWTRHLIIPGFTLRRAWMFSQILFTGCMLCTVFVRTVTAATVLIGLVGITWALTLWAPWAIISAEISQRDEERRSQQQRLSPSRLDNLDGYSSDGNQDSDLGKDDEEAADQAGVILGIHNMAIAAPQIIATVASSIIFRLFQKPRGTPGDHSIAIVLALGGITVLISALFIHRIRDEPTVTYDEISAVEEGDAAPRPNVHSRSRSFDQPPRASLERATLVRNKSFGGMEY

SEQ ID NO: 24006 - protein, 599 aa, Drosophila melanogaster
MVGVTADASQANQLSSVRNPMIKYMLKTRENHAREQDRDYSHVFRRKTRFEMFRLSAIAMAIEFAYAAETSFVSPILLQIGVDHKHMSMTWGLSPLIGFFMSPLLGSISDRCKLRWGRRRPIISILSFGIMCGLILVPYGKDLGLLLGDAGYTYAESALNFTSSSGGSVAALVSGEATTGPSASDYKFAVILTILGMVLLDFDADTCQTPARTYLLDMCVPEEQPKAMTMFALFAGFGGTIGYAIGGVDWETTHIGSFMGGNIPTVFTLVTIIFAVCYLITVTTFREIPLPLIEQDELLRPLSEQAIKKELKKKNNTIYYIQETTQLELQMASDDPKRLEALQGSYQNGYSPAVEKQGKSQDLETQSDYDAPVSLKAYLKSIFIMPYSMRMLALTNLFCWMGHVTYCLYFTDFVGEAVFHGDPTAAPNSEAALNYEAGVRFGCWGMAIYAFSCSIYSLSVTKLMKWFGTKAVYISGMIYYGIGMLVLGLWPTKWGVLVFSTSAGILYGTIFTVPFILVARYHAKNCFSIKNGEIVPLKQARGLGTDVAIISSMVFIAQLIVSLSVGPLVSWMDTTCAVLYASTFLSFLAAIAAMFVLYV

SEQ ID NO: 24007 - protein, 576 aa, Oryzias latipes
MTLLSEDQSARPQPCLLSEPDKHISTSLDQYRPDYTKEDYMDSVETSVFGTVEPPRRSRGRLILHSMVMFGREFCYAVEAAFVTPVLLSVGLPRSLYSLVWLISPILGFLLQPIIGSASDYCRSSWGRRRPYILVLGILMLVGLSMFLNGDAVVSELVSDRSSRSTWAIVVVMFGVVLFDFAADFIDGPIKAYLFDVCSYQDKERGLHYHALFTGLGGACGYLVGAMDWGHSVLGRLLGSEYQVIYFFSALTWGVFLIVHLFSIPEKPLAKVPSESSASSALRLLGPHSNGYGALGKEPVSPVIPTSSPEIRPRSYSALGERPRSFSALGEANSVTSSAKQPIKEDQKKMTFRSLMKAIFNMPNHYRFLCISHLLGWAAFLCNMLFFTDFMGQIVYRGNPYAEHNSTAYITYERGVEVGCWGLCINAVSSALYSYVQRFLLPYIGLKGLYFMGYFVFGMGTSLIGLFPEVIATLILCSVFGVMSSTLYTIPFNLIAEYQREEEEQVKLEGGNESPRGTGMDCAALTCMVQLAQIIVGAGLGALVNAAGSVIVVVLSASSISLIGCIFIALFIRYVE

SEQ ID NO: 24008 - protein, 553 aa, Macaca fascicularis
MVQRLWVSRLLRHRKAQLLLINLLTFGLEVCLAAGITYVPPLLLEVGVEEKFMTMVLGIGPVLGLVSVPLLGSASDHWRGRYGRRRPFIWALSLGILLSLFLIPRAGWLAGLLCPDPRPLELALLILGVGLLDFCGQVCFTPLEALLSDLFRDPDHCRQAYSVYAFMISLGGCLGYLLPAIDWDTSALAPYLGTQEECLFGLLTLIFLTCVAATLLVAEEAALGPAEPAEGLSAPSLPSHCCPCWARLAFRNLGALLPRLHQLCCRMPRTLRRLFVAELCSWMALMTFTLFYTDFVGEGLYQGVPRAELGTEARRHYDEGVRMGSLGLFLQCAISLVFSLVMDRLVQRFGTRAVYLASVAAFPVAAGATCLSHSVAVVTASAALTGFTFSALQILPYTLASLYHRERQVFLPKYRGDAGGTSSEDSLMTSFLPGPKPGAPFPNGHVGAGGSGLLPPPPALCGASACDVSVRVVVGEPTEARVVPGRGICLDLAILDSAFLLSQVAPSLFMGSIVQLSQSVTAYMVSAAGLGLVAIYFATQVVFDKSDLAKYSV

SEQ ID NO: 24009 - protein, 501 aa, Macaca fascicularis
MTMVLGIGPVLGLVSVPLLGSASDHWRGRYGRRRPFIWALSLGILLSLFLIPRAGWLAGLLCPDPRPLELALLILGVGLLDFCGQVCFTPLEALLSDLFRDPDHCRQAYSVYTFMISLGGCLGYLLPAIDWDTSALAPYLGTQEECLFGLLTLIFLTCVAATLLVAEEAALGPAEPAEGLSAPSLPSHCCPCWARLAFRNLGALLPRLHQLCCRMPRTLRRLFVAELCSWMALMTFTLFYTDFVGEGLYQGVPRAELGTEARRHYDEGVRMGSLGLFLQCAISLVFSLVVDRLVQRFGTRAVYLASVAAFPVAAGATCLSHSVAVVTASAALTGFTFSALQILPYTLASLYHRERQVFLPKYRGDAGGTSSEDSLMTSFLPGPKPGAPFPNGHVGAGGSGLLPPPPALCGASACDVSVRVVVGEPTEARVVPGRGICLDLAILDSAFLLSQVAPSLFMGSIVQLSQSVTAYMVSAAGLGLVAIYFATQVVFDKSDLAKYSV

SEQ ID NO: 24010 - protein, 530 aa, Homo sapiens
MGSNSGQAGRHIYKSLADDGPFDSVEPPKRPTSRLIMHSMAMFGREFCYAVEAAYVTPVLLSVGLPSSLYSIVWFLSPILGFLLQPVVGSASDHCRSRWGRRRPYILTLGVMMLVGMALYLNGATVVAALIANPRRKLVWAISVTMIGVVLFDFAADFIDGPIKAYLFDVCSHQDKEKGLHYHALFTGFGGALGYLLGAIDWAHLELGRLLGTEFQVMFFFSALVLTLCFTVHLCSISEAPLTEVAKGIPPQQTPQDPPLSSDGMYEYGSIKKVKNGYVNPELAMQGAKNKNHAEQTRRAMTLKSLLRALVNMPPHYRYLCISHLIGWTAFLSNMLFFTDFMGQIVYRGDPYSAHNSTEFLIYERGVEVGCWGLCINSVFSSLYSYFQKVLVSYIGLKGLYFTGYLLFGLGTGFIGLFPNVYSTLVLCSLFGVMSSTLYTVPFNLITEYHREEEKERQQAPGGDPDNSVRGKGMDCATLTCMVQLAQILVGGGLGFLVNTAGTVVVVVITASAVALIGCCFVALFVRYVD

SEQ ID NO: 24011 - protein, 530 aa, Homo sapiens
MGSNSGQAGRHIYKSLADDGPFDSVEPPKRPTSRLIMHSMAMFGREFCYAVEAAYVTPVLLSVGLPSSLYSIVWFLSPILGFLLQPVVGSASDHCRSRWGRRRPYILTLGVMMLVGMALYLNGATVVAALIANPRRKLVWAISVTMIGVVLFDFAADFIDGPIKAYLFDVCSHQDKEKGLHYHALFTGFGGALGYLLGAIDWAHLELGRLLGTEFQVMFFFSALVLTLCFTVHLCSISEAPLTEVAKGIPPQQTPQDPPLSSDGMYEYGSIEKVKNGYVNPELAMQGAKNKNHAEQTRRAMTLKSLLRALVNMPPHYRYLCISHLIGWTAFLSNMLFFTDFMGQIVYRGDPYSAHNSTEFLIYERGVEVGCWGFCINSVFSSLYSYFQKVLVSYIGLKGLYFTGYLLFGLGTGFIGLFPNVYSTLVLCSLFGVMSSTLYTVPFNLITEYHREEEKERQQAPGGDPDNSVRGKGMDCATLTCMVQLAQILVGGGLGFLVNTAGTVVVVVITASAVALIGCCFVALFVRYVD

SEQ ID NO: 24012 - protein, 553 aa, Homo sapiens
MVQRLWVSRLLRHRKAQLLLVNLLTFGLEVCLAAGITYVPPLLLEVGVEEKFMTMVLGIGPVLGLVCVPLLGSASDHWRGRYGRRRPFIWALSLGILLSLFLIPRAGWLAGLLCPDPRPLELALLILGVGLLDFCGQVCFTPLEALLSDLFRDPDHCRQAYSVYAFMISLGGCLGYLLPAIDWDTSALAPYLGTQEECLFGLLTLIFLTCVAATLLVAEEAALGPTEPAEGLSAPSLSPHCCPCRARLAFRNLGALLPRLHQLCCRMPRTLRRLFVAELCSWMALMTFTLFYTDFVGEGLYQGVPRAEPGTEARRHYDEGVRMGSLGLFLQCAISLVFSLVMDRLVQRFGTRAVYLASVAAFPVAAGATCLSHSVAVVTASAALTGFTFSALQILPYTLASLYHREKQVFLPKYRGDTGGASSEDSLMTSFLPGPKPGAPFPNGHVGAGGSGLLPPPPALCGASACDVSVRVVVGEPTEARVVPGRGICLDLAILDSAFLLSQVAPSLFMGSIVQLSQSVTAYMVSAAGLGLVAIYFATQVVFDKSDLAKYSA

SEQ ID NO: 24013 - protein, 243 aa, Homo sapiens
MGSNSGQAGRHIYKSLADDGPFDSVEPPKRPTSRLIMHSMAMFGREFCYAVEAAYVTPVLLSVGLPSSLYSIVWFLSPILGFLLQPVVGSASDHCRSRWGRRRPYILTLGVMMLVGMALYLNGATVVAALIANPRRKLVWAISVTMIGVVLFDFAADFIDGPIKAYLFDVCSHQDKEKGLHYHALFTDSQGNDIKVTAESTGEHASSLPLPLHQPPHWMDGLPVQHAVLHRFHGPDCVPRGSL

SEQ ID NO: 24014 - protein, 187 aa, Equus caballus
MGGNSGQPGVPTYKSLAEDGPFGSVELPKRSTGRLVMHSMAMFGREFCYAVEAAYVTPVLLSVGLPKRLYSVVWLLSPVLGFLLQPVVGSASDHCRARWGRRRPYILALSVIMLLGMALYLNGDAVISALIADRRKKLTWAITITMIGVVLFDFAADFIDGPIKAYLFDVCSHQDKERGLHHHALFT

SEQ ID NO: 24015 - protein, 521 aa, Anopheles gambiae str. PEST
MYGTYQQQERLTEDDILQGMLESRQRFAKLDNSRGYQHSFRKKSKWELVRLSLLIVGIECTYATETALVAPILLGIGLPHTVMTMIWATPSLAGLLFAPVIASVSDRLRSRWGRRRPVLLALGCTILTGMLVLPNGPAIGELVGLTSVGWVATITTVGLIMSDFSAETSNGLCRTYAMEVCTIRDQARVLSIMVLTGGIGATMGALFGAINWNRLGIGRLLGGNGPSVFAANWIVLFLGLLVTLTSFSEIPLPVQESEPMLRPVTQKMLLDEVKRAQGEGRVQEEKEEVQEVVGFKQFVHNVLHMPRSMKVLCLTQLLSHMSYLTYCLYYTDFVGATVYEGDVRALKGSAAAELYDDGVRFACLGMALCSTTSSIYSVFIEGLIVRFGARPVYVGGLLAHCCGMLAMGLMPHKLVVFGCCALTGVMYATIYSIPFLLISHYHSKNCFTEVDGQYVESIEPRGFGVDVSMMSSMLCLAQLIVSLAIGAVIDAVGSTIIITFISSAFMLCAAGSAMAILYMEL

SEQ ID NO: 24016 - protein, 607 aa, Citrus sinensis
MSETRSFKVPYRNLKKGTAAEVEMIEADEFHHRIDLNSNASSPPSSSHSPIPNGTSNFAVRPKQCSLITLVLSCTVAAGVQFGWALQLSLLTPYIQTLGIQHAFSSFIWLCGPITGLVVQPCVGIWSDKCTSKYGRRRPFILAGCLMISVAVIIIGFSADIGYILGDTKEHCSKFRGTRTRAAFVFVIGFWLLDLANNTVQGPARALLADLSGPDQRNSANAILCSWMAVGNILGFSAGASGSWHRWFPFLTSRACCAACGNLKAAFLVAVVFLTLCALVTIYFADEVPLTVNQPNHLTDSAPLLDDPQRTAISKSKHDMPAAPNANGNKVESGHERDANLKHISKKAEDPNGSFNDGPGAVLVNLLTSLRHLPPAMHVVLVVMALTWLSWFPFFLFDTDWMGREVYHGDPKGNDHEVKFYDQGVREGAFGLLLNSVVLGVSSFLIEPMCRWIGSRLVWAISNFIVFACMATTAIISVISVRRNILEGIEHGIGANQAIKVASLVVFTLLGFPLAITYSVPFAITGELTADSGGGQGLAIGVLNLAIVIPQMIVSLGAGPWDALFGGGNIPAFGLASLSALAGGVVATLKLPHLSSNSFTSSGFHFG

SEQ ID NO: 24017 - protein, 612 aa, Vitis vinifera
MPETMDAPSIRVPYKNLKQAEVELVAADEPRHGADLNSRVPNGTSDPSSSPSSIPHPPKHGGLRTLILSCMIAAGVQFGWALQLSLLTPYIQTLGIEHAFSSFIWLCGPITGLVVQPCVGIWSDKCSSKYGRRRPFILAGSLMISVAVTIIGFSADIGYLLGDTNMDCRKFKGTRTWAAIIFVLGFWMLDLANNTVQGPARALLADLSGPDQRNSANAIFCSWMAVGNILGFSAGASGHWHRWFPFLLNKACCEACGNLKAAFLIAVVFLTLCTLVTLYFAEEVPLMAYQPHHLSDSAPLLDNPQQIGFDNSKSKLDMSAVDNATGNNPESSYEINKNAKHLTPIVQEQNESFSDGPGAVLVNLLTSLRHLPPAMHSVLLVMALSWLSWFPFFLFDTDWMGREVYHGDPKGDESAVKAYDAGVREGAFGLLLNSVDLGISSFLIEPMCQRMGARLVWAMSNFIVFACMAGTAIISLVSVNEYITEGIQHAIGENRAIKIASLVVFALLGFPLSITYSVPFSITAELTADTGGGQGLAIGVLNLAIVIPQMIVSLGAGPWDALFGGGNIPAFVLAALFALAAGVIATLKLPNLSSSSYKSSGFHFGNFPASMR

SEQ ID NO: 24018 - protein, 594 aa, Arabidopsis thaliana
MSDSVSISVPYRNLRKEIELETVTKHRQNESGSSSFSESASPSNHSDSADGESVSKNCSLVTLVLSCTVAAGVQFGWALQLSLLTPYIQTLGISHAFSSFIWLCGPITGLVVQPFVGIWSDKCTSKYGRRRPFILVGSFMISIAVIIIGFSADIGYLLGDSKEHCSTFKGTRTRAAVVFIIGFWLLDLANNTVQGPARALLADLSGPDQRNTANAVFCLWMAIGNILGFSAGASGKWQEWFPFLTSRACCAACGNLKAAFLLAVVFLTICTLVTIYFAKEIPFTSNKPTRIQDSAPLLDDLQSKGLEHSKLNNGTANGIKYERVERDTDEQFGNSENEHQDETYVDGPGSVLVNLLTSLRHLPPAMHSVLIVMALTWLSWFPFFLFDTDWMGREVYHGDPTGDSLHMELYDQGVREGALGLLLNSVVLGISSFLIEPMCQRMGARVVWALSNFTVFACMAGTAVISLMSLSDDKNGIEYIMRGNETTRTAAVIVFALLGFPLAITYSVPFSVTAEVTADSGGGQGLAIGVLNLAIVIPQMIVSLGAGPWDQLFGGGNLPAFVLASVAAFAAGVIALQRLPTLSSSFKSTGFHIG

SEQ ID NO: 24019 - protein, 506 aa, Oryza sativa (japonica cultivar-group); identical to SEQ ID NO: 23982

SEQ ID NO: 24020 - protein, 501 aa, Daucus carota
MAGPEADRNRHRGGATAAPPPRSRVSLRLLLRVASVACGIQFGWALQLSLLTPYVQELGIPHAWSSIIWLCGPLSGLLVQPIVGHMSDQCTSKYGRRRPFIVAGGTAIILAVIIIAHSADIGGLLGDTADNKTMAIVAFVIGFWILDVANNMTQGPCRALLADLTGNDARRTRVANAYFSLFMAIGNVLGYATGAYSGWYKVFPFSLTSSCTINCANLKSAFYIDIIFIIITTYISISAAKERPRISSQDGPQFSEDGTAQSGHIEEAFLWELFGTFRLLPGSVWVILLVTCLNWIGWFPFILFDTDWMGREIYGGEPNQGQSYSDGVRMGAFGLMMNSVVLGITSVLMEKLCRIWGSGFMWGLSNILMTICFFAMLLITFIAKNMDYGTNPPPNGIVISALIVFAILGIPLAITYSVPYALVSTRIESLGLGQGLSMGVLNLAIVVPQVIVSLGSGPWDQLFGGGNSPAFVVAALSAFAAGLIALIAIRRPRVDKSRLHH

SEQ ID NO: 24021 - protein, 604 aa, Lycopersicon esculentum
MDAVSIRVPYKNLKQQEVELTNVDESRFAQLEIRSDSSSPRVSNGEMNDSNLPLPPPPVRNSLLTLILSCTVAAGVQFGWALQLSLLTPYIQTLGIEHAFSSFIWLCGPITGLVVQPCVGIWSDKCHSKYGRRRPFIFIGAVMISIAVIIIGFSADIGYLLGDTKEHCSTFKGTRSRAAIVFVVGFWMLDLANNTVQGPARALLADLSGPDQRNTANAVFCSWMAVGNILGFSAGASGGWHRWFPFLTNRACCEPCGNLKAAFLVAVVFLTLCTLVTLYFANEVPLSPKQYKRMSDSAPLLDSPQNTGFDLSQSKRELQYRNSVANNESEMGHVADNSPKNEEQRPDKDQGDSFADSPGAVLVNLLTSLRHLPPAMHSVLIVMALTWLSWFPFFLFDTDWMGREVYHGDPKGEADEVNAYNQGVREGAFGLLLNSVVLGVSSFLIEPMCKWIGSRLVWAVSNFIVFVCMACTAIISVVSISANTQGVQHVIGATRSTQIAALVVFSLLGIPLAVTYSVPFSITAELTADAGGGQGLAIGVLNLAIVVPQMVVSLGAGPWDALFGGGNIPAFALASLAALAAGIFAMLRLPNLSSNFKSTGFHFG

SEQ ID NO: 24022 - protein, 595 aa, Neurospora crassa
MTDSIPPTDGKTPDNTCAPLEPRQKYSTTQSPFPDFEFPVEQGNPSYQGEKSSDRHCKEEEEGLSPNQWVASGEQEDNSGSYSEAENVEMSTWRGSPSVKGSTETMRMLLLTCVSVGITFTWGVEMTCVVADQSKSRWGRRRPVIVIGSIITALALMALGFTKEIVAYFIWDPTYARACTIAVAVLSLYCVDFAINADTLPIQKQQSGAAWASRMGSLGHIIGYGMGAIDLLQLFGTSLGDTQFKQLTVIAALGMLVTSSVTCWAVTERVLVTVRPDPRRQSGRFKVVRQIVSTLITLPPRIRAICYAVFWSWIGWFPFIIYSSTWVGETYFRYDVPADTRDSSDALGDMGRIGSTALTVYSTVTFISAWILPPFIRAPEDNTFTHRPPASIASLVETVNKYKPELLSAWIASHLMFAFAMFLTPFAASFRFATALVALCGIPWSIAIWAPTTFLGVEVNKLSGAPDPMSPGATSATNPSYRRLSTSSIEMRFVNEPAAGAVEEVTAGNSSTGELSGIYFGILNIYTTIPQFIATFMSSIVFAILEPGKSPELATDAHPSEHAKTDGPNAIAVCMFIGAISSLVAAYATAKMRDI

SEQ ID NO: 24023 - protein, 511 aa, Glycine max
  unsure (1)..(511): unsure at all Xaa locations
MAGGGYVDSGNAKQFEGKVTAFVLVTCFVAAMGGLLFGYDLGITGGVTSMEPFLIKFFPGVYKQMQDDVGHRSQYCKFDNELLTLFTSSLYLAALVASFFASSTTRMMGRKASMFLGGLFFLVGTLMRGNSAXVPMFQKRCRFIDLNIDYXASXEHGGLFFLVGALLNGFAVNIEMIIIWKPMLSANLINYGTSKLENGWRISLGVGAVPAVLLCFGALFLGDTPNSLIERGQKEEARKMLQKIRGIDNVEEELQELVLASESAKEVEHPWKNITTPKYRPQLTFCTLIPFFQQLTGINVVMFYAPVLFKTLGFGNDASLMSSVITGGVNVVATLVSILTVDKVGRKVLFLEGGVQMLICQIATGVMIAMKFGVSGEGSFSSGEANLILFFICAFVAAFAWSWGPLGWLVPSEICPLEVRSAGQAINVAVNMLFTFAIAQVFLVMLCHLKFGLFFFFAAFVLIMTIFIAMLLPETKNIPIEEMHTVWRSHWFWSKIVPHADDDRKPEAAQS

SEQ ID NO: 24024 - protein, 473 aa, Oryza sativa
  unsure (1)..(473): unsure at all Xaa locations
MPGAVIVHHHTRYKTYPGEVTGFVFFCCLIASVGGCIFGYDIGLTAGLTSTESFLAMFFPVIFEQQQERVITNQYCKFDSQVLTLVGSSLFLFAMVAGIFASPMSRAFGRKWTLFVAAVAYLIGAILGAISFNFIVLLTGRLLLGVGVGVCIHASPLYISEMAPAQQRGMLNILFQLMITVGILSASLTTYWTSKIAGGWGWRVGLAFGTVPAAVIALGSLAIPDTPVSLIARGEGEAARATLAKIRGVDDVRAEFEDLTTASEESKAVAHPWRELFFGGRYKPQLAFAXXASLVSSVITGLVNVFSTFVAVMTADKILVGTFIGLQFGVSGTGAMSEQYAMCIVLFVCVYVAGFAWSWGPMGWLIPSEVYPLAVRSAAQSVTVAVNMFFTAFISQIFLTLLCHLRFGLFYFFGAWVLLMTVFIATLLPETKCVPLEEVAHVWRKHWFWRKFIVDSPGGGAEMRKRIALEMSX

SEQ ID NO: 24025 - protein, 489 aa, Oryza sativa
  unsure (1)..(489): unsure at all Xaa locations
MPGAVIVXTTTRGXKTYPGEVTGFVFFCCLIASVGGCIFGYDIGLTAGLTSTESFLAMFFPVIFEQQQERVITNQYCKFDSQVLTLVGSSLFLFAMVAGIFASPMSRAFGRKWTLFVAAVAYLIGAILGAISFNFIVLLTGRLLLGVGVGIGLQASPLYISEMAPAQQRGMLNILFQLMITVGILSASLTTYWTSKIAGGWGWRVGLAFGTVPAAVIALGSLAIPDTPVSLIARGEGEAARATLAKIRGVDDVRAEFEDLTTASEESKAVAHPWRDLLRRQVQXXQLAFATVGFRQDASLVSSVITGLVNVFSTFVAVMTADKVGRRALFLQXILVGTFIGLQFGVSGTGAMSEQYAMCIVLFVCVYVAGFAWSWGPMGWLIPSEVYPLAVRSAAQSVTVAVNMFFTAFISQIFLTLLCHLRFGLFYFFGAWVLLMTVFIATLLPETKCVPLEEVAHVWRKHWFWRKFIVDSPDRGGAEMRKRIALEMS

SEQ ID NO: 24026 - protein, 525 aa, Trypanosoma congolense
MSDAQEGRERAPDTVMVSPDEVHEDNAPRFFSAENLGVVQVQVIGGTLNGFSIGFVAVYLMLYEVSTNCSLAKAGASCEGMKNVKCKWSDDDGCTWANACDSVRDPNVCLDKVGYDALHSGIFASSMIVGSMIGSIVTERFITMFGLKKSFLIVAIIGVVASAMNHIAVGTDEFWVLCPARLLMGLGLGIVCVLCPMYVNENAHSKHRKVDGVMFQVFITFGIMLAALLGLALYYTVDYETNVAMVDRLHGFCAVSSILAVVMFIAGIFLRESKTKFVNEGSGKVEGELDPNEYSWGEMMWPLFMGTMTAGTLQLTGINAVMNYAPKITENLGMDPPLGNFLVMMWNFVTALVAIPLASRFTMRQMFITCSFIASCTCLFLCGIPVFPGVAEESVKNGVATTGIALFIAAFEFGVGSCFFVLAQDLFPPSFRPKGASFVVMMQFVFNILVNLLYPITTEAISGGASGNQDKGQAVSFILFGLIGLVCFVLQYFYLYPYEAKSVEGSPNDPQQRMASPIEVATPRN

SEQ ID NO: 24027 - protein, 525 aa, Trypanosoma congolense
MSDAQEGRERAPDTVMVSPDEVHEDNAPRFFSAENLGVVQVQVIGGTLNGFSIGFVAVYLMLYEVSTNCSLAKAGASCEGMKNVKCKWSDDDGCTWANACDSVRDPNVCLDKVGYDALHSGIFASSMIVGSMIGSIVTERFITMFGLKKSFLIVAIIGVVASAMNHIAVGTDEFWVLCPARLLMGLGLGIVCVLCPMYVNENAHSKHRKVDGVMFQVFITFGIMLAALLGLALYYTVDYETNVAMVDRLHGFCAVSSILAVVMFIAGIFLRESKTKFVNEGSGKVEGELDPNEYSWGEMMWPLFMGTMTAGTLQLTGINAVMNYAPKITENLGMDPPLGNFLVMMWNFVTALVAIPLASRFTMRQMFITCSFIASCTCLFLCGIPVFPGVAEESVKNGVATTGIALFIAAFEFGVGSCFFVLAQDLFPPSFRPKGASFVVMMQFVFNILVNLLYPITTEAISGGASGNQDKGQAVSFILFGLIGLVCFVLQYFYLYPYEAKSVEGSPSDPQQRMASPIEVATPRN

SEQ ID NO: 24028 - protein, 389 aa, Chlamydomonas reinhardtii
MAAMMMRQKVAGAIAGERRSAVAPKMGRAATAPVVVASANASAFKGAAVTARVKASTRAARVQSRRTAVLTQAKIGDSLAEFLVEATPDPKLRHVMMSMAEATRTIAHKVRTASCAGTACVNSFGDEQLAVDMVADKLLFEALKYSHVCKLACSEEVPEPVDMGGEGFCVAFDPLDGSSIVDTNFAVGTIFGVWPGDKLTNITGREQVAAGMGIYGPRTVFCIALKDAPGCHEFLLMDDGKWMHVKETTHIGGQDVRPRQPARHLRQPRLRAPDQLLPGREVHPALHRRHRARLVPDHCQGEGCVHQLDLAHHQGQAPHPVRGCSPGPAGIEKAGGASSCDGKAVSALDIPILVCDQRTQICYGSIGEVRRFEEYMYGTSPRFSEKVVA

SEQ ID NO: 24029 - protein, 181 aa, Glycine max
MGGPVEGGFSVAFDPLDGSSIVDTNFTVGTIFGVWPGDKLTGITGRDQVAAAMGVLGPRTTYVLALKDFPGTHEFLLLDEGKWQHVKETTEIGEGKLFSPGNLRATSDNPDYAKVAPLGFLIEKAGGYSSDGHQSVLDKVISNIDDRTQVAYGSKNEIIRFEETLYGKSRLKGGVAVGAAA

SEQ ID NO: 24030 - protein, 128 aa, Glycine max
  unsure (1)..(128): unsure at all Xaa locations
METVAAAGYARGAATRSPACCAAMSFSQSYRPKAARPATSFYGESLRANTARTSFPAGRQSKAASRAALTTRCAIGDSLEEFLTKATPDKNLIRLLICMGEAMRTIAFKVRTASCGGTACVNSFGDEX

SEQ ID NO: 24031 - protein, 106 aa, Glycine max
  unsure (1)..(106): unsure at all Xaa locations
MQQTGGFIXAPSLIIVKXKGIFTNVSSPSAKAKLRLLFEVAPLGFLIEKAGGYSSDGHQSVLDKVISNIDDRTQVAYGSKNEIIRFEETLYGKSRLKGGVAVGAAA

SEQ ID NO: 24032 - protein, 185 aa, Glycine max
  unsure (1)..(185): unsure at all Xaa locations
METNIACYTRGPFLPRIIPKHSSTLXISPSFGLRSLNSSSLFGESLXVASKSPLKVSKTKITSLVTRCEIGDSLEEFLTQATPHMGLIRLLVSMGXALRTISFKVKTASWGXGTQCVNTFGDEQLAVDSLANQLLCEAFRYSHFCGCACSEENAVLLDMGRHSRCVWCVSCNPLDGSRIVFSHFA

SEQ ID NO: 24033 - protein, 162 aa, Triticum aestivum
  unsure (1)..(162): unsure at all Xaa locations
XPLGEGKMFSPGNLRAPFDNPDXAQLVPSYXKEKYPLRYPPGMVPYVPPILVKEKGIFPNVTSPTAQAKLRLLFQVAPLGFFIKKAGGPNNDGKQSVLDKVISVLDERTQVAYGSKNEIIPFEETLYGSSRLAPSPPVGPPPPKSIPLLFLPLFPPEKPNAP

SEQ ID NO: 24034 - protein, 100 aa, Triticum aestivum
METVAAAGYARGADTRSPACCAAMSFSQSYRPKAARPATTFYGESLRANTARTSFPAGRQYKAASQAALTILYAGGDRAEENLTNATSIKVPVRQLYSVV

SEQ ID NO: 24035 - protein, 68 aa, Zea mays
  unsure (1)..(68): unsure at all Xaa locations
XGDSLEEFLTKATPDKNLIRLLICMGDARGTIAVKVRAASCGESACVKSFGDEQLAVDRRANRLLFEA

SEQ ID NO: 24036 - protein, 358 aa, Neurospora crassa
MTTSHSLKAAAPPATPLTAALTTHLASLLPSSSRDSLRTSVLPSLLTSIAATSTALRAAQDVSLAGSSNSFGDDQLNVDVLAEEAIRLCLAQCPSVVTASSEEDPIEKPVQHTGLPFQVVEAEQDRTHGEVYTVAFDPLDGSSIIAPNWTVGTIFSLWDGTSALGASPRDKQIGAVLGVYGPRTTAVVALRFPGEEKGVCFEVGLSDSSEAGKGQEWDLIRPSVSYAPPPFKTRYFAPANLRSTNTHAAYAKLVAHYMAENYTLRYCGGLVPDVVHALVKGHGVYLSPVTETSKAKLRSLYELFPLALVVECCGGRAVDPVSGENILGDKGVEGCDERGGIVCGTAEEVEYAKEVLCG

SEQ ID NO: 24037 - protein, 38 aa, Mus musculus
DGSAPYGARYVGSMVADIHRTLVYGGIFLYPANKKSPS

SEQ ID NO: 24038 - protein, 54 aa, Sparus aurata
GTIFGIYKKTTDGEPCEKDALQPGRNIVAAGYALYGSATMMVLSTGQGVNCFML

SEQ ID NO: 24039 - protein, 123 aa, Oryza sativa
  unsure (1)..(123): unsure at all Xaa locations
XLLXNPVNXMQNCYEKYEMXYLDGIFYDXQIIVKEKGIFTNVTSPTAKAKLRLLFEVAPLGFLIEKAGGYSSDGKQSVLDKVINNLDERTQVAYGSKNEIIRFEETLYGSSRLTAGATVGAAA

SEQ ID NO: 24040 - protein, 67 aa, Oryza sativa
  unsure (1)..(67): unsure at all Xaa locations
LFLLKXDAKWPHVKDTTTIGEGKMFSPGYLRATFDNPEYDKLINYYVKEKYTLRYTGGMVPRVNHIX

SEQ ID NO: 24041 - protein, 110 aa, Oryza sativa
  unsure (1)..(110): unsure at all Xaa locations
LDRPAIETAAGDRYTRGGGTRSTACCADRSMXRSNYRPKAWRPSSTFYGKSWRVNTGRCAACGRHCKEASRTGLAPEXEIWDSMEEFLTKETPDNNLIRLLISMGEAMRX

SEQ ID NO: 24042 - protein, 102 aa, Oryza sativa
  unsure (1)..(102): unsure at all Xaa locations
PQQKNQXXRPAXETXAAASNTRGAATRPPAXSAAKXXXQXNRPKAXRPPSTXNGEXXRXNTARXXPXGRQXKAASRAARSTRXENGDSXEEXQTKATPEKNX

SEQ ID NO: 24043 - protein, 98 aa, Oryza sativa
  unsure (1)..(98): unsure at all Xaa locations
XPRVRGVDAVRVDGGVQGGAVRRGGEGLCKSDTRRIQNGKMFYTGNLRATFDNCEYDKFINYYVMEKFTLRYIGGKVFGDNHIKNEEIGIFTNVTCTT

SEQ ID NO: 24044 - protein, 524 aa, Mesocricetus auratus
MSSIYGLLNFMSATELLLAITVFCLGFWVVRALRTQVPKGLKTPPGPWGLPILGHVLTLGKNPHLSLTKLSKQYGDVLQIRIGSTPVVVLSGLDTIRQALVRQGDDFKGRPDFYSFTLITNGKSMTFNPDCGPVWAARRRLAQDALKSFSIALDPASASSCYLEEYVIKEADYLISKFQKLMAEVGHFDPDRYLVVSVTNVICAMCFGQRYDHDDQELLSIVNLSNEFGKVTGSGYPPDFIPILRYLPNSSLDAFKDLNKKFYSFMQKSVKEHYRTFEKGHIRDITDSLIEHCQDKSLDENANVQLSDDRVINIIVDLFGAGFDTVTTAISWSLMYLVTNPGVQRKIQEELDTVIGRSRRPRLCDRSQLPYLEAFILETFRHSSFLPFTIPHSTTRDTSLCGFYIPKGHCVFVNQWQINHNQELWGDPNKFRPERFLTSSGTLDKVLSGKVTLFGLGKRKCIGETIGRLEVFLFLAILLQQIEFTVSPGEKVDMTPIYGLTLKHARCEYFQAQTRSSGPQHPQA

SEQ ID NO: 24045 - protein, 524 aa, Mesocricetus auratus
MSSIYGLLNFMSATELLVAITVFCLGFWVVRALRTQVPKGLKTPPGPWGLPILGHVLTLGKNPHLSLTKLSKQYGDVLQIRIGSTPVVVLSGLDTIRQALVRQGDDFKGRPDFYSFTLITNGKSMTFNPDCGPVWAARRRLAQDALKSFSIALDPASASSCYLEEYVIKEADYLISKFQKLMAEVGHFDPDRYLVVSVTNVICAMCFGQRYDHDDQELLSIVNLSNEFGKVTGSGYPPDFIPILRYLPNSSLDAFKDLNKKFYSFMQKSVKEHYRTFEKGHIRDITDSLIEHCQDKSLDENANVQLSDDRVINIIVDLFGAGFDTVTTAISWSLMYLVTNPGVQRKIQEELDTVIGRSRRPRLCDRSQLPYLEAFILETFRHSSFLPFTIPHSTTRDTSLCGFYIPKGHCVFVNQWQINHNQELWGDPNKFRPERFLTSSGTLDKVLSGKVTLFGLGKRKCIGETIGRLEVFLFLAILLQQIEFTVSPGEKVDMTPIYGLTLKHARCEYFQAQTRSSGPQYPQA

SEQ ID NO: 24046 - protein, 521 aa, Mus musculus
MYGLPAFVSATELLLAVTVFCLGFWVVRATRTWVPKGLKTPPGPWGLPFIGHMLTVGKNPHLSLTRLSQQYGDVLQIRIGSTPVVVLSGLNTIKQALVRQGDDFKGRPDLYSFTLITNGKSMTFNPDSGPVWAARRRLAQNALKSFSIASDPTSASSCYLEEHVSKEANYLVSKLQKVMAEVGHFDPYKYLVVSVANVICAICFGQRYDHDDQELLSIVNLSNEFGEVTGSGYPADFIPVLRYLPNSSLDAFKDLNDKFYSFMKKLIKEHYRTFEKGHIRDITDSLIEHCQDRKLDENANVQLSDDKVITIVLDLFGAGFDTVTTAISWSLMYLVTNPRVQRKIQEELDTVIGRDRQPRLSDRPQLPYLEAFILETFRHSSFVPFTIPHSTTRDTSLNGFYIPKGCCVFVNQWQVNHDRELWGDPNEFRPERFLTPSGTLDKRLSEKVTLFGLGKRKCIGETIGRSEVFLFLAILLQQIEFKVSPGEKVDMTPTYGLTLKHARCEHFQVQMRSSGPQHLQA

SEQ ID NO: 24047 - protein, 524 aa, Mus musculus
MPSMYGLPAFVSATELLLAVTVFCLGFWVVRATRTWVPKGLKTPPGPWGLPFIGHMLTVGKNPHLSLTRLSQQYGDVLQIRIGSTPVVVLSGLNTIKQALVRQGDDFKGRPDLYSFTLITNGKSMTFNPDSGPVWAARRRLAQNALKSFSIASDPTSASSCYLEEHVSKEANYLVSKLQKVMAEVGHFDPYKYLVVSVANVICAICFGQRYDHDDQELLSIVNLSNEFGEVTGSGYPADFIPVLRYLPNSSLDAFKDLNDKFYSFMKKLIKEHYRTFEKGHIRDITDSLIEHCQDRKLDENANVQLSDDKVITIVLDLFGAGFDTVTTAISWSLMYLVTNPRVQRKIQEELDTVIGRDRQPRLSDRPQLPYLEAFILETFRHSSFVPFTIPHSTTRDTSLNGFYIPKGCCVFVNQWQVNHDRELWGDPNEFRPERFLTPSGTLDKRLSEKVTLFGLGKRKCIGETIGRSEVFLFLAILLQQIEFKVSPGEKVDMTPTYGLTLKHARCEHFQVQMRSSGPQHLQA

SEQ ID NO: 24048 - protein, 501 aa, Mus musculus
MIMFLSSLVTTFWEALHLKTLVLAVVTFLFLINILRSRHPKNYPPGPWRLPFVGNFFQIDTKQTHLVLQQFVKKYGNVFSLELGQSPVVVVSGLPLIKEMFTHLDQNFVNRFMTPVRERITGKNGLVVSNGQTWKEQRRLALMALRNFGLGKKSLEERIQEETHHLVEAIREEGGQPFNPHLKLINAVSNIICSVTFGERFDYEDCQFQELLQLLDETMHLMGSSAGQLYNGFPCIMKYLPGPHQKIFRNWGKLKLFVSHIVKKHEKDWNPDEPRDFIDAFLIEMQKDPDRTTSFNEENLISTTLDLFLGGTETTSSTLRWALLYMSSYPEIQENVQAEIDRVIGHKRQVSLSDRESMPYTNAVIHEVQRMGNIVPLNSSREVTVDTKFNGFHLPKGTMILTNLTALHRDPKEWATPEVFNPEHFLENGQFKKRESFLPFSMGKRACLGEQLAKSELFIFFSALMQKFTFKPPINEKLSLKFRMGLILSPASYRICAIPRV

SEQ ID NO: 24049 - protein, 524 aa, Rattus norvegicus
MPSVYGFPAFTSATELLLAVTTFCLGFWVVRVTRTWVPKGLKSPPGPWGLPFIGHVLTLGKNPHLSLTKLSQQYGDVLQIRIGSTPVVVLSGLNTIKQALVKQGDDFKGRPDLYSFTLIANGQSMTFNPDSGPLWAARRRLAQNALKSFSIASDPTLASSCYLEEHVSKEAEYLISKFQKLMAEVGHFDPFKYLVVSVANVICAICFGRRYDHDDQELLSIVNLSNEFGEVTGSGYPADFIPILRYLPNSSLDAFKDLNKKFYSFMKKLIKEHYRTFEKGHIRDITDSLIEHCQDRRLDENANVQLSDDKVITIVFDLFGAGFDTITTAISWSLMYLVTNPRIQRKIQEELDTVIGRDRQPRLSDRPQLPYLEAFILETFRHSSFVPFTIPHSTIRDTSLNGFYIPKGHCVFVNQWQVNHDQELWGDPNEFRPERFLTSSGTLDKHLSEKVILFGLGKRKCIGETIGRLEVFLFLAILLQQMEFNVSPGEKVDMTPAYGLTLKHARCEHFQVQMRSSGPQHLQA

SEQ ID NO: 24050 - protein, 524 aa, Rattus norvegicus
MPSVYGFPAFTSATELLLAVTTFCLGFWVVRVTRTWVPKGLKSPPGPWGLPFMGHVLTLGKNPHLSLTKLSQQYGDVLQIRIGSTPVVVLSGLNTIKQALVKQGDDFKGRPDLYSFTLIANGQSMTFNPDSGPLWAARRRLAQNALKSFSIASDPTLASSCYLEEHVSKEAEYLISKFQKLMAEVGHFDPFKYLVVSVANVICAICFGRRYDHDDQELLSIVNLSNEFGEVTGSGYPADFIPILRYLPNSSLDAFKDLNKKFYSFMKKLIKEHYRTFEKGHIRDITDSLIEHCQDRRLDENANVQLSDDKVITIVFDLFGAGFDTITTAISWSLMYLVTNPRIQRKIQEELDTVIGRDRQPRLSDRPQLPYLEAFILETFRHSSFVPFTIPHSTIRDTSLNGFYIPKGHCVFVNQWQVNHDQELWGDPNEFRPERFLTSSGTLDKHLSEKVILFGLGKRKCIGETIGRLEVFLFLAILLQQMEFNVSPGEKVDMTPAYGLTLKHARCEHFQVQMRSSGPQHLQA

SEQ ID NO: 24051 - protein, 524 aa, Rattus norvegicus
MPSVYGFPAFTSATELLLAVTTFCLGFWVVRVTRTWVPKGLKSPPGPWGLPFIGHVLTLGKNPHLSLTKLSQQYGDVLQIRIGSTPVVVLSGLNTIKQALVKQGDDFKGRPDLYSFTLIANGQSMTFNPDSGPLWAARRRLAQNALKSFSIASDPTLASSCYLEEHVSKEAEYLISKFQKLMAEVGHFDPFKYLVVSVANVICAICFGRRYDHDDQELLSIVNLSNEFGEVTGSGYPADFIPILRYLPNSSLDAFKDLNKKFYSFMKKLIKEHYRTFEKGHIRDITDSLIEHCQDRRLDENANVQLSDDKVITIVFDLFGAGFDTITTAISWSLMYLVTNPRIQRKIQEELDTVIGRDRQPRLSDRPQLPYLEAFILETFRHSSFVPFTIPHSTIRDTSLNGFYIPKGHCVFVNQWQVNHDQELWGDPNEFRPERFLTSSGTLDKHLSEKVILFGLGKRKCIGETIGRLEVFLFLAILLQQMEFNVSPGEKVDSTPAYGLTLKHARCEHFQVQMRSSGPQHLQA

SEQ ID NO: 24052 - protein, 507 aa, Rattus norvegicus
MWELVGLLLLILAYFFWVKSKTPGAKLPRSLPSLPLVGSLPFLPRRGHMHVNFFKLQEKYGPIYSLRLGTTTTVIIGHYQLAREVLIKKGKEFSGRPQMVTQSLLSDQGKGVAFADAGSSWHLHRKLVFSTFSLFKDGQKLEKLICQEAKSLCDMMLAHDKESIDLSTPIFMSVTNIICAICFNISYEKNDPKLTAIKTFTEGIVDATGDRNLVDIFPWLTIFPNKGLEVIKGYAKVRNEVLTGIFEKCREKFDSQSISSLTDILIQAKMNSDNNNSCEGRDPDVFSDRHILATVGDIFGAGIETTTTVLKWILAFLVHNPEVKKKIQKEIDQYVGFSRTPTFNDRSHLLMLEATIREVLRIRPVAPMLIPHKANVDSSIGEFTVPKDTHVVVNLWALHHDENEWDQPDQFMPERFLDPTGSHLITPTQSYLPFGAGPRSCIGEALARQELFVFTALLLQRFDLDVSDDKQLPRLEGDPKVVFLIDPFKVKITVRQAWMDAQAEVST

SEQ ID NO: 24053 - protein, 516 aa, Cavia porcellus
MSTSAMELLLTATIFCLVLWVVRIFRPQVPKGLKSPPGPWGWPLIGHMLTLGKNPHLALTRLSARYGDVLQIRIGSTPVVVLSGLDTIRQALVRQGDDFKGRPDLYSFTFISDGQSMTFNPDSGPVWAARRRLAQSALKSFSVASDPASVSSCYLEEHVKKEAEYLIKKFQELMAGPGHFDPYRYVVVSVANVISAICFGQRYSHDDQQLLELIDLNNEFGEVTGSGNPSDFIPILRYLPSATMDTFKDLNRRFSVFIQKMIKEHYKTFEKGHIRDITDSLIEHCQDRKLDKNANIQISDQKIIGIVLDLFGAGFDTITTAISWSLLYLVMNPRIQKKIQEELDTVIGRERQPQLADRPKLPYMEAFISEVFRYSSFMPFTIPHSTTKDTSLNGFYIPKGCCIFVNQWQINHDQKLWGDPSVFRPERFLSPDGTVDKALSEKVTIFGLGKRRCLGEVIGRWEVFLFLAILLQQLEFSTSPGVKIDMTPIYGLTMKYSRCEHFQAQTRPFVLKCPEA

SEQ ID NO: 24054 - protein, 522 aa, Vigna radiata
MLLELALGLLVLALFLHLRPTPTAKSKALRHLPNPPSPKPRLPFIGHLHLLKDKLLHYALIDLSKKHGPLFSLYFGSMPTVVASTPELFKLFLQTHEATSFNTRFQTSAIRRLTYDSSVAMVPFGPYWKFVRKLIMNDLLNATTVNKLRPLRTQQIRKFLRVMAQGAEAQKPLDLTEELLKWTNSTISMMMLGEAEEIRDIAREVLKIFGEYSLTDFIWPLKHLKVGKYEKRIDDILNKFDPVVERVIKKRREIVRRRKNGEVVEGEVSGVFLDTLLEFAEDETMEIKITKDHIKGLVVDFFSAGTDSTAVATEWALAELINNPKVLEKAREEAYSVVGKDRLVDEVDTQNLPYIRAIVKETFRMHPPLPVVKRKCTEECEINGYVIPEGALILFNVWQVGRDPKYWDRPSEFRPERFLETGAEGEARPLDLRGQHFQLLPFGSGRRMCPGVNLATSGMATLLASLIQCFDLQVLGPQGQILKGGDAKVSMEERAGLTVPRAHSLVCVPLARIGVASKLLSK

SEQ ID NO: 24055 - protein, 521 aa, Vigna radiata
MLLELALGLLVLALFLHLRPTPTAKSKALRHLPNPPSPKPRLPFIGHLHLLKDKLLHYALIDLSKKHGPLFSLYFGSMPTVVASTPELFKLFLQTHEATSFNTRFQTSAIRRLTYDSSVAMVPFGPYWKFVRKLIMNDLLNATTVNKLRPLRTQQIRKFLRAMAQGAEAQKPLDLTEELLKWTNSTISMMMLGEAEEIRDIAREVLKIFGEYSLTDFIWPLKHLKVGKYEKRIDDILNKFDPVVERVIKKRREIVRRRKNGEVVEGEVSGVFLDTLLEFAEDETMEIKITKDHIKGLVVDFFSAGTDSTAVATEWALAELINNPKVLEKAREEVYSVVGKDRLVDEVDTQNLPYIRAIVKETFRMHPPLPVVKRKCTEECEINGYVIPEGALILFNVWQVGRDPKYWDRPSEFRPERFLETGAEGEARPLDLRGQHFQLLPFGSGRRMCPGVNLATSGMATLLASLIQCFDLQVLGPQGQILKGGDAKVSMEERAGLTVPRAHSLVCVPLARIGVASKLLS

SEQ ID NO: 24056 - protein, 521 aa, Vigna radiata
MLLELALGLLVLALFLHLRPTPTAKSKALRHLPNPPSPKPRLPFIGHLHLLKDKLLHYALIDLSKKHGPLFSLYFGSMPTVVASTPELFKLFLQTHEATSFNTRFQTSAIRRLTYDSSVAMVPFGPYWKFVRKLIMNDLLNATTVNKLRPLRTQQIRKFLRVMAQGAEAQKPLDLTEELLKWTNSTISMMMLGEAEEIRDIAREVLKIFGEYSLTDFIWPLKHLKVGKYEKRIDDILNKFDPVVERVIKKRREIVRRRKNGEVVEGEVSGVFLDTLLEFAEDETMEIKITKDHIKGLVVDFFSAGTDSTAEATEWALAELINNPKVLEKAREEVYSVVGKDRLVDEVDTQNLPYIRAIVKETFRMHPPLPVVKRKCTEECEINGYVIPEGALILFNVWQVGRDPKYWDRPSEFRPERFLETGAEGEARPLDLRGQHFQLLPFGSGRRMCPGVNLATSGMATLLASLIQCFDLQVLGPQGQILKGGDAKVSMEERAGLTVPRAHSLVCVPLARIGVASKLLS

SEQ ID NO: 24057 - protein, 521 aa, Vigna radiata
MLLELALGLLVLALFLHLRPTPTAKSKALRHLPNPPSPKPRLPFIGHLHLLKDKLLHYALIDLSKKHGPLFSLYFGSMPTVVASTPELFKLFLQTHEATSFNTRFQTSAIRRLTYDSSVAMVPFGPYWKFVRKLIMNDLLNATTVNKLRPLRTQQIRKFLRVMAQGAEAQKPLDLTEELLKWTNSTISMMMLGEAEEIRDIAREVLKIFGEYSLTDFIWPLKHLKVGKYEKRIDDILNKFDPVVERVIKKRREIVRRRKNGEVVEGEVSGVFLDTLLEFAEDETTEIKITKDHIKGLVVDFFSAGTDSTAVATEWALAELINNPKVLEKAREEVYSVVGKDRLVDEVDTQNLPYIRAIVKETFRMHPPLPVVKRKCTEECEINGYVIPEGALILFNVWQVGRDPKYWDRPSEFRPERFLETGAEGEARPLDLRGQHFQLLPFGSGRRMCPGVNLATSGMATLLASLIQCFDLQVLGPQGQILKGGDAKVSMEERAGLTVPRAHSLVCVPLARIGVASKLLS

SEQ ID NO: 24058 - protein, 506 aa, Pyrus communis
MSPPEIAILILVFLTFLWSLLRLINVSSRQSRTLPPGPAALPIIGNLHMLGDLPHRSLQNLAKKYGPIMSMRLGSVPTIVVSSPKTAKLFLKTHDTIFASRPKLQASEYMAYGTKAMAFTEYGPYWRHIRKLCTLQLLCPSKIESFAPLRREEVGLLVQSLKVAAEAGEVVDFSEKVGELVEGITYRMVLGRKNDDMFDLKGIIEEALFLTGAFNISDYVPFLSPLDLQGLTKRMKRVSKTVDQLFEKIIQDHEQVSRSEQGNHHKDFVDVLLSSIHQTLKPNDEEVYMLERTNAKATLLDMIAGAFDTSATAIIWTLAELLRHPKVMKRLQEELQSVIGMDRMVEESDLPKLDYLSMVVKESFRLHPVAPLLVPHQSMEDITVDGYHTPKKSRIFINIWTIGRDPKSWDNAEEFYPERFMNRNVDLRGHDFQLIPFGSGRRGCPAMQLGLTTVRLALGNLLHCSNWELPSGMLPKDLDMTEKFGLSLSKAKHLLATPTCRLYNES

SEQ ID NO: 24059 - protein, 505 aa, Zinnia elegans
MDLLLVEKTLLALFAAIIASIFISKLRGKRFKLPPGPVPVPIFGNWLQVGDDLNHRNLTDLAKKFGEIFLLRMGQRNLVVVSSPNLAKEVLHTQGVEFGSRTRNVVFDIFTGKGQDMVFTVYGEHWRKMRRIMTVPFFTNKVVQQYRTGWEAEAAAVVDDVKKNPKAATEGVVIRKRLQLMMYNNMFRIMFDRRFESEDDPLFVKLKMLNGERSRLAQSFEYNYGDFIPILRPFLKGYLKLCKEVKEKRFQLFKDYFVDERKKLGSTKSMDNNQLKCAIDHILDAKDKGEINEDNVLYIVENINVAAIETTLWSIEWAIAELVNHPEIQAKLRHELVSQLGPGVQVTEPDLHKLPYLQAVIKETLRLRMAIPLLVPHMNLHDAKLGGYDIPAESKILVNAWWLANNPDQWKKPEEFRPERFLEEESKVEANGNDFRYLPFGVGRRSCPGIILALPILGITIGRLVQNFELLPPPGQDKVDTTEKGGQFSLHILKHSTIVAKPRVL

SEQ ID NO: 24060 - protein, 454 aa, Populus sieboldii x Populus grandidentata
DLNHRNLTDLAKKFGDILLLRMGQRNLVVVSSPDLAKEVLHTQGVEFGSRTRNVVFDIFTGKGQDMVFTVYGEHWRKMRRIMTVPFFTNKVVQQYRHGWEEEAAQVVEDVKKNPEAATHGIVLRRRLQLMMYNNMYRIMFDRRFESEEDPLFNKLKALNGERSRLAQSFDYNYGDFIPILRPFLRGYLKICKEVKERRLQLFKDYFVEERKKLGSTKSMSNEGLKCAIDHILDAQKKGEINEDNVLYIVENINVAAIETTLWSIEWGIAELVNHPEIQKKLRDELDTVLGPGHQITEPDTYKLPYLNAVIKETLRLRMAIPLLVPHMNLHDAKLGGFDIPAESKILVNAWWLANNPAKWKNPEEFRPERFFEEEAKVEANGNDFRYLPFGVGRRSCPGIILALPILGITLGRLVQNFELLPPPGQSKIDTSEKGGQFSLHILKHSTIVAKPRSF

SEQ ID NO: 24061 - protein, 505 aa, Populus tremuloides
MDLLLLEKTLLGSFVAILVAILVSKLRGKRFKLPPGPLPVPVFGNWLQVGDDLNHRNLTDLAKKFGDILLLRMGQRNLVVVSSPELSKEVLHTQGVEFGSRTRNVVFDIFTGKGQDMVFTVYGEHWRKMRRIMTVPFFTNKVVQQYRYGWEEEAAQVVEDVKKNPGAATHGIVLRRRLQLMMYNNMYRIMFDRRFESEEDPLFNKLKALNGERSRLAQSFDYNYGDFIPILRPFLRGYLKICQEVKERRLQLFKDYFVDERKKLASTKNMCNEGLKCAIDHILDAQKKGEINEDNVLYIVENINVAAIETTLWSIEWGIAELVNHPEIQKKLRHELDTLLGPGHQITEPDTYKLPYLNAVVKETLRLRMAIPLLVPHMNLHDAKLGGFDIPAESKILVNAWWLANNPAHWKNPEEFRPERFLEEEAKVEANGNDFRYLPFGVGRRSCPGIILALPILGITLGRLVQNFELLPPPGQSKIDTSEKGGQFSLHILKHSTIVAKPRSF

SEQ ID NO: 24062 - protein, 513 aa, Populus balsamifera subsp. trichocarpa
MDSLLQSLQTLPMSFFLIIISSIFFLGLISRLRRRSPYPPGPKGFPLIGSMHLMDQLTDRGLAKLAKQYGGLFHMRMGYLHMVAGSSPEVARQVLQVQDNMFSNRPANIAISYLTYDRADMAFAHYGPFWRQMRKLCVMKLFSRKRAESWESVRDEVDSMVKTVESNIGKPVNVGELIFTLTMNITYRAAFGAKNEGQDEFIKILQEFSKLFGAFNISDFIPWLGWIDPQGLTARLVKARKALDKFIDHIIDDHIQKRKQNNYSEEAETDMVDDMLTFYSEETKVNESDDLQNAIKLTRDNIKAIIMDVMFGGTETVASAIEWAMAELLKSPEDIKRVQQELADVVGLERRVEESDFDKLTFFKCTLKETLRLHPPIPLLLHETSEDAEVAGYYVPKKTRVMINAYAIGRDKNSWEDPDSFKPSRFLEPGVPDFKGNHFEFIPFGSGRRSCPGMQLGLYALDLAVAHLLHCFTWELPDGMKPSELDMTDMFGLTAPRATRLVAVPRKRVVCPL

SEQ ID NO: 24063 - protein, 505 aa, Populus balsamifera subsp. trichocarpa X Populus deltoides
MDLLLLEKTLLGSFVAILVAILVSKLRGKRFKLPPGPIPVPVFGNWLQVGDDLNHRNLTDLAKKFGDIFLLRMGQRNLVVVSSPDLSKEVLHTQGVEFGSRTRNVVFDIFTGKGQDMVFTVYGEHWRKMRRIMTVPFFTNKVVQQYRYGWEEEAAQVVEDVKKNPEAATNGIVLRRRLQLMMYNNMYRIMFDRRFESEDDPLFNKLKALNGERSRLAQSFDYNYGDFIPILRPFLRGYLKICQEVKERRLQLFKDYFVDERKKLASTKNMSNEGLKCAIDHILDAQKKGEINEDNVLYIVENINVAAIETTLWSIEWGIAELVNHPEIQKKLRHELDTLLGPGHQITEPDTYKLPYLNAVIKETLRLRMAIPLLVPHMNLHDAKLGGFDIPAESKILVNAWWLANNPAHWKNPEEFRPERFLEEEAKVEANGNDFRYLPFGVGRRSCPGIILALPILGITLGRLVQNFELLPPPGQSKIDTAEKGGQFSLHILKHSTIVAKPRSF

SEQ ID NO: 24064 - protein, 520 aa, Brassica napus
MESSISQTLSQVIDPTTGILIVVSLFIFIGLITRRRRPPYPPGPRGWPIIGNMSMMDQLTHRGLANLAKKYGGLCHLRMGFLHMYAVSSPDVAKQVLQVQDSVFSNRPATIAISYLTYDRADMAFAHYGPFWRQMRKVCVMKVFSRKRAESWASVRDEVDKMIRSVSSNVGKSINVGEQIFALTRNITYRAAFGSACEKGQDEFIRILQEFSKLFGAFNVADFIPYFGWIDPQGINKRLVKARNDLDGFIDDIIDEHMKKKENQNSVDAGDVVDTDMVDDLLAFYSEEAKLVSETADLQNSIKLTRDNIKAIIMDVMFGGTETVASAIEWALTELLRSPEDLNRVQQELAEVVGLDRRVEESDIEKLTFLKCTLKETLRLHPPIPLLLHETAEDTEIDGYFVPKKSRVMINAFAIGRDKNSWVDPETFRPSRFLEPGVPDFKGSNFEFIPFGSGRRSCPGMQLGLYALELAVAHILHCFTWKLPDGMKPSELDMSDVFGLTAPKATRLYAVPSTRLICSV

SEQ ID NO: 24065 - protein, 520 aa, Brassica napus
MESSISQTLSQVLDPTTGILIVVSLFIFIGLITRRRRPPYPPGPRGWPIIGNMSMMDQLTHRGLANLAKKYGGLCHLRMGFLHMYAVSSPDVAKQVLQVQDSVFSNRPATIAISYLTYDRADMAFAHYGPFWRQMRKVCVMKVFSRKRAESWASVRDEVDKMIRSVSSNVGKSINVGEQIFALTRNITYRAAFGSACEKGQDEFIRILQEFSKLFGAFNVADFIPYFGWIDPQGINKRLVKARNDLDGFIDDIIDEHIKKKENQNSVDAGDVVDTDMVDDLLAFYSEEAKLVSETADLQNSIKLTRDNIKAIIMDVMFGGTETVASAIEWALTELLRSPEDLKRVQQELAEVVGLDRRVEESDIEKLTFLKCTLNETLRLHPPIPLLLHETAEDTEIDGYFVPKKSRVMINAFAIGRDKNSWVDPETFRPSRFLEPGVPDFKGSNFEFIPFGSGRRSCPGMQLGLYALELAVAHILHCFTWKLPDGMKPSELDMSDVFGLTAPKATRLYAVPCTRLICSV

SEQ ID NO: 24066 - protein, 506 aa, Ruta graveolens
MDLLLLEKALLGLFAAAVVAIAVSKLRGKRFKLPPGPLGFPVFGNWLQVGDDLNQRKLANLSKKFGDVYLLRMGQRNLVVVSSPEMAKEVLHTQGVEFGSRTRNVVFDIFTGKGQDMVFTVYSEHWRKMRRIMTVPFFTNKVVQQQRFNWEDEAARVVEDVKKDPQAATTGIVLRRRLQLLMYNNMYRIMFDRRFESVDDPLFNKLKALNGERSRLAQSFEYNYGDFIPILRPFLRGYLKLVKEVKERRLKLFKDYFVEERKKLTSTKSMTEENFKCAIDHVLDAQQKGEINEDNVLYIVENINVAAIETTLWSIEWGIAELVNHPDIQKKLRAEIDRVLGPDHQITEPDTHKLPYLQAVIKETLRLRMAIPLLVPHMNLNDAKLAGYDIPAESKILVNAWWLANNPAHWKDPQVFRPERFLEEESGVEANGNDFRYIPFGVGRRSCPGIILALPILGITIGRMVQNFELLPPPGQSKIDTSEKGGQFSLFILNHSTIVLKPRSSV

SEQ ID NO: 24067 - protein, 506 aa, Ruta graveolens
MDLLLLEKALLGLFAAAVVAIAVSKLRGKRFKLPPGPFGFPVFGNWLQVGDDLNQRKLANLSKKFGDVYLLRMGQRNLVVVSSPEMAKEVLHTQGVEFGSRTRNVVFDIFTGKGQDMVFTVYSEHWRKMRRIMTVPFFTNKVVQQQRFNWEDEAARVVEDVKKDPQAATTGIVLRRRLQLLMYNNMYRIMFDRRFESVDDPLFNKLKALNGERSRLAQSFEYNYGDFIPILRPFLRGYLKLVKEVKERRLKLFKDYFVEERKKLTSTKSMTEENFKCAIDHVLDAQQKGEINEDNVLYIVENINVAAIETTLWSIEWGIAELVNHPDIQKKLRAEIDRVLGPDHQITEPDTHKLPYLQAVIKETLRLRMAIPLLVPHMNLNDAKLAGYDIPAESKILVNAWWLANNPAHWKDPQVFRPERFLEEESGVEANGNDFRYIPFGVGRRSCPGIILALPILGITIGRMVQNFELLPPPGQSKIDTSEKGGQFSLFILNHSTIVLKPRSSV

SEQ ID NO: 24068 - protein, 505 aa, Citrus x paradisi
MDLLLLEKTLLALFAAVVVAITVSKLRGKRFKLPPGPLPVPVFGNWLQVGDDLNHRNLSDLAKKYGDVLLLRMGQRNLVVVSSPDHAKEVLHTQGVEFGSRTRNVVFDIFTGKGQDMVFTVYGEHWRKMRRIMTVPFFTNKVVQQQRFNWEDEAARVVEDVKKDPEAATNGIVLRRRLQLMMYNNMYRIMFDRRFESQDDPLFNRLKALNGERSRLAQSFEYNYGDFIPILRPFLRGYLKICKEVKERRLQLFKDYFVEERKKLASTKSMSNESLKCAIDHILDAQTKGEINEDNVLYIVENINVAAIETTLWSIEWGIAELVNHPEIQKKLRNELDTVLGPGHQITEPDTHKLPYLQAVIKETLRLRMAIPLLVPHMNLHDAKLGGYDVPAESKILVNAWWLANNPAQWKKPEEFRPERFLEEESKVEANGNDFRYLPFGVGRRSCPGIILALPILGITIGRLVQNFELLPPPGQSKIDTAEKGGQFSLHILKHSTIVAKPRSF

SEQ ID NO: 24069 - protein, 525 aa, Cicer arietinum
MRLVEIAVTLVLIALFIHFRPTPTAKSKALRHLPNPPSPKPRLPFVGHLHLLDHPLLHQSLIRLGERYGPLYSLYFGSMPTIVASTPDLFKLFLQTHEAVSFNTRFQTSAIRRLTYDNSVAMVPFAPYWKFIRKLIMNDLLNATTVNKLRPLRSQEIRKVLNVMAKSAQTQEPLNVTEELLKWTNSTISRMMLGEAEEIRDIARDVLKIFGEYSLTDFIWPLKKLKVGKYEKKIEEIFNRFDPVIEKVIKKRQDVRRRRKERNGELEEGEQSVVFLDTLLDFAEDETMEIKITKEQIKGLVVDFFSAGTDSTAVATDWCLSELINNPRVMKKAREEVDSVVGKDRLVDESDIQNLPYIRAVVKETFRMHPPLPVVKRKCTEECEINGYVIPEGALVLFNVWAVGRDPKYWDRPLEFRPERFLENAGEGDAGSIDLRGQHFQLLPFGSGRRMCPGVNLATAGMATLLSSVLQCFELQVAGPNGQILKGADAKVSMDERPGLTVPRAHNLVCVPLARPGAAAKLLSS

SEQ ID NO: 24070 - protein, 500 aa, Lens culinaris
FLHLRPTPTAKSKALRHLPNPPSPKPRLPFIGHLHLLKDKLLHYALIDLSKKHGPLFSLYFGSMPTVVASTPELFKLFLQTHEATSFNTRFQTSAIRRLTYDSSVAMVPFGPYWKFVRKLIMNDLLNATTVNKLRPLRTQQIRKFLRVMAQGAEAQKPLDLTEELLKWTNSTISMMVLGEAEEIRDIAREVLKIFGEYSLTDFIWPLKHLKVGKYEKRIDDILNKFDPVVERVIKKRREIVRRRKNGEVVEGEVSGVFLDTLLEFAEDETMEIKITKDHIKGLVVDFFSAGTDSTAVATEWALAELINNPKVLEKAREEVYSVVGKDRLVDEVDTQNLPYIRAIVKETFRMHPPLPVVKRKCTEECEINGCVTPEGALILFNVWQVGRDPKYWDRPSEFRPERFLETGAEGEARPLDLRGRHFQLLPFGSGRRMCPGVNLATSGMATLLASLIQCFDLQVLGPQGQILKGGDAKVSMEERAGLTVPRAHSLVCVPLARIG

SEQ ID NO: 24071 - protein, 500 aa, Lens culinaris
FLHLRPTPTAKSKALRHLPNPPSPKPRLPFIGHPHLLKDKLLHYALIDLSKKHGPLFSLYFGSMPTVVASTPELFKLFLQTHEATSFNTRFQTSAIRRLTYDSSVAMVPFGPYWKFVRKLIMNDLLNATTVNKLRPLRTQQIRKFLRVMAQSAEAQKPLDVTEELLKWTNSTISMMMLGEAEEIRDIAREVLKIFGEYSLTDFIWPLKYLKVGKYEKRIDDILNKFDPVVERVIKKRREIVRRRKNGEVVEGEASGVFLDTLLEFAEDETMEIKITKEQIKGLVVDFFSAGTDSTAVATEWALAELINNPRVLQKAREEVYSVVGKDILVDEVDTQNLPYIRAIVKETFRMHPPLPVVKRKCTEECEINGHVIPEGALVLFNVWQVGRDPKYWDRPSEFRPERFLETGAEGEAGPLDLRGQHFQLLPFGSGRRMCPGVNLATSGMATLLASLIQCFDLQVLGPQGQILKGDDAKVSMEERAGLTVPRAHSLVCVPLARIG

SEQ ID NO: 24072 - protein, 523 aa, Medicago truncatula
MLVELAVTLLVIALFIHLRPTPTAKSKALRHLPNPPSPKPRLPFIGHLHLLDNPLLHHTLIKLGKRYGPLYTLYFGSMPTVVASTPDLFKLFLQTHEATSFNTRFQTSAISRLTYDNSVAMVPFAPYWKFIRKLIMNDLLNATTVNKLRPLRSREILKVLKVMANSAETQQPLDVTEELLKWTNSTISTMMLGEAEEVRDIARDVLKIFGEYSVTNFIWPLNKFKFGNYDKRTEEIFNKYDPIIEKVIKKRQEIVNKRKNGEIVEGEQNVVFLDTLLEFAQDETMEIKITKEQIKGLVVDFFSAGTDSTAVATEWTLAELINNPRVWKKAQEEIDSVVGKDRLVDESDVQNLPYIRAMVKEVFRLHPPLPVVKRKCTEECEINGYVIPEGALILFNVWQVGRDPKYWEKPLEFRPERFLENASQGEGEAASIDLRGQHFTLLPFGSGRRMCPGVNLATAGMATLLSSIIQCFDLQVPGPHGQILKGDDVKVSMDERPGLTVPRAHNLMCVPLARAGVAAKLLS

SEQ ID NO: 24073 - protein, 521 aa, Pisum sativum
MLLELALGLFVLALFLHLRPTPSAKSKALRHLPNPPSPKPRLPFIGHLHLLKDKLLHYALIDLSKKHGPLFSLSFGSMPTVVASTPELFKLFLQAHEATSFSTRFQTSAVRRLTYDNSVAMVPFGPYWKFVRKLIMNDLLNATTVNELRPLRTQQIRKFLRVMAQSAEAQKPLDVTEELLKWTNSTISMMMLGEAEEIRDIAREVLKIFGEYSLTDFIWPLKYLKVGKYEKRIDDILNKFDPVVERVIKKRREIVRRRKNGEVVEGEASGVFLDTLLEFAEDETMEIKITKEQIKGLVVDFFSAGTDSTAVATEWALAELINNPRVLQKAREEVYSVVGKDRLVDEVDTQNLPYIRAIVKETFRMHPPLPVVKRKCTEECEINGYVIPEGALVLFNVWQVGKDPKYWDRPSEFRPERFLETGAEGEAGPLDLRGQHFQLLPFGSGRRMCPGVNLATSGMATLLASLIQCFDLQVLGPQGQILKGDDAKVSMEERAGLTVPRAHSLVCVPLARIGVASKLLS

SEQ ID NO: 24074 - protein, 521 aa, Pueraria montana var. lobata
MLLELALGLLVLALFLHLRPTPTAKSKALRHLPNPPSPKPRLPFIGHLHLLKDQLLHHALIDLSKKYGPLYSLYFGSMPTVVASTPELFKLFLQTHEATSFNTRFQTSAIRRLTYDNSVAMVPFGPYWKFIRKLIMNDLLNATTVNKLRPLRTEQIRKFLRVMAQSAEAQQPLNVTEELLKWTNSTISMMMLGEAEEIRDIAREVLKIFGEYSVTNFIWPLMYLKVGKYEKRIDDIFNKFDPVIERVIKKRREIVRRRKNGEVVEGEASGVFLDTLLEFAEDETMEIKITKEQIKGLVVDFFSAGTDSTAVATEWALAELINNPRVLQKARDEVYSVVGKDRLVDEVDTQNLPYIRAIVKETFRMHPPLPVVKRKCVEECEVNGFVIPEGALILFNVWAVGRDPKYWDRPLEFRPERFLESGAEGEVGPIDLRGQHFQLLPFGSGRRMCPGVNLATSGMATLLASLIQCFDLQVVGPKGEILKGNDAKVSMEESAGLTVPRAHNLRCVPLARTSVAAKLLS

SEQ ID NO: 24075 - protein, 505 aa, Vigna radiata var. radiata
MDLLLLEKTLLGLFLAAVVAIVVSKLRGKRFKLPPGPLPVPIFGNWLQVGDDLNHRNLTQLAKRFGDIFLLRMGQRNLVVVSSPDLAKEVLHTQGVEFGSRTRNVVFDIFTGEGQDMVFTVYGEHWRKMRRIMTVPFFTNKVVQQYRHGWEAEAAAVVDDVRKNPDAAVSGLVIRRRLQLMMYNNMYRIMFDRRFESEEDPLFQRLKALNGERSRLAQSFEYNYGDFIPILRPFLKGYLKICKEVKETRLKLFKDYFVDERKNIGSTKSTNNEGLKCAIDHILDAEKKGEINEDNVLYIVENINVAAIETTLWSIEWGIAELVNHPEIQQKVRDEIDRVLGVGHQVTEPDIQKLPYLQAVVKETLRLRMAIPLLVPHMNLHDAKLGGYDIPAESKILVNAWWLANNPAHWKKPEEFRPERFFEEESHVEANGNDFRYLPFGVGRRSCPGIILALPILGITLGRLVQNFELLPPPGQSQIDTSEKGGQFSLHILKHSTVVAKPRSF

SEQ ID NO: 24076 - protein, 535 aa, Oryza sativa (japonica cultivar-group)
MEVAAMEISTSLLLTTVALSVIVCYALVFSRAGKARAPLPLPPGPRGWPVLGNLPQLGGKTHQTLHEMTKVYGPLIRLRFGSSDVVVAGSAPVAAQFLRTHDANFSSRPRNSGGEHMAYNGRDVVFGPYGPRWRAMRKICAVNLFSARALDDLRAFREREAVLMVRSLAEASAAPGSSSPAAVVLGKEVNVCTTNALSRAAVGRRVFAAGAGEGAREFKEIVLEVMEVGGVLNVGDFVPALRWLDPQGVVARMKKLHRRFDDMMNAIIAERRAGSLLKPTDSREEGKDLLGLLLAMVQEQEWLAAGEDDRITDTEIKALILNLFVAGTDTTSTIVEWTMAELIRHPDILKHAQEELDVVVGRDRLLSESDLSHLTFFHAIIKETFRLHPSTPLSLPRMASEECEIAGYRIPKGAELLVNVWGIARDPAIWPDPLEYKPSRFLPGGTHTDVDVKGNDFGLIPFGAGRRICAGLSWGLRMVTMTAATLVHAFDWQLPADQTPDKLNMDEAFTLLLQRAEPLVVHPVPRLLPSAYNIA

SEQ ID NO: 24077 - protein, 526 aa, Oryza sativa (japonica cultivar-group)
MDVVPLPLLLGSLAVSAAVWYLVYFLRGGSGGDAARKRRPLPPGPRGWPVLGNLPQLGDKPHHTMCALARQYGPLFRLRFGCAEVVVAASAPVAAQFLRGHDANFSNRPPNSGAEHVAYNYQDLVFAPYGARWRALRKLCALHLFSAKALDDLRAVREGEVALMVRNLARQQAASVALGQEANVCATNTLARATIGHRVFAVDGGEGAREFKEMVVELMQLAGVFNVGDFVPALRWLDPQGVVAKMKRLHRRYDNMMNGFINERKAGAQPDGVAAGEHGNDLLSVLLARMQEEQKLDGDGEKITETDIKALLLNLFTAGTDTTSSTVEWALAELIRHPDVLKEAQHELDTVVGRGRLVSESDLPRLPYLTAVIKETFRLHPSTPLSLPREAAEECEVDGYRIPKGATLLVNVWAIARDPTQWPDPLQYQPSRFLPGRMHADVDVKGADFGLIPFGAGRRICAGLSWGLRMVTLMTATLVHGFDWTLANGATPDKLNMEEAYGLTLQRAVPLMVQPVPRLLPSAYGV

SEQ ID NO: 24078 - protein, 511 aa, Pelargonium x hortorum
MYNMSLYLLLGSSALAFAAYLVLFSFSKSRRRLPPGPKAWPIVGNLPHMGSMPHQNLAAMARTYGPLVYLRLGFVDVVVALSASMASQFLKTHDSNFSSRPPNAGAKHIAYNYHDLVFAPYGPRWRLFRKITSIHLFSGKALDDYRHVRQEEVGVLASNLARAVSTIVNLGQLLNICATNALGRAVIGKKVFKDGTDDVDPKADEFKSMVVELMVLAGVFNIGDFIPPLDCLDLQGVASKMKNLHKRFDAFLSAILQEHNINSAASATPSMLTTLISLKDSVEDSEGGKLTDTEIKALLLNMFTAGTDTTSSTVEWAIAELIRQPEILIRAQKEIDSVVGRDRLVTELDLSKLPYLQAIVKETFRLHSSTPLSLPRIATQSCEINGYHIPKGATLLVNVWAIARDPDVWADPLSFRPERFLPGSEKENVDVKGNDFELIPFGAGRRICAGMSLGLRMVQLLTATLLHAFNWDLPQGQIPQELNMDEAYGLTLQRASPLHVRPRPRLPSHLY

SEQ ID NO: 24079 - protein, 505 aa, Solanum melongena
MDVPCPWYSLLIPLFVFIFLLIHHCFFTTSKKQNMLLLPSPRKLPIIGNLHQLGSLPHRSLHKLSQKYGPVMLLHFGSKPVIVASSVDAARDIMKTHDVVWASRPKSSIVDRLSYGSKDVGFSPFGEYWRRAKSITVLHLLSNTRVQSYRNVRAEETANMIGKIRQGCDSSVINLGEHLCSLTNNIISRVALGRTYDEKESGIEHIIEQFVELLGIFNVGDYIPRLEWVNKFTGLDAKVKKVAKELDMFLEIVIEEHIIRKKKEEYTSTGEAKDFVDVLLEIQNGNETDFPLQRDSLKAILLDSFAAGTDTTFATLDWTMAELLRQPRALKTLQDEVRGLAQGKSEITEDDLKNMQYLRAVIKESLRLHPTQESLLVPRESMEDVNLLGYYHIPARTQAIINAWAIGRDPLSWENPEEYQPERFLNSDADVKGLNFKLLPFGAGRRGCPGSSFAIAVIELALARLVHKFDFALPEGIKPEDLDMTETIGITTRRKLPLLVVATPC

SEQ ID NO: 24080 - protein, 507 aa, Solanum melongena
MDVPCLWYSLLILLLLFIFLLIHHCFTTSKTQNMFLPPSPRKLPIIGNLHQLGSHPHRSLRKLSQKYGPVMLLHLGSKPVIVASSVDAARDILKTHDHVWATRPKYSIADSLLYGSKDVGFSPFGEYWWQVRSIVVLHLLSNKRVQSYRDVREEETANMIEKIRQGCDASVINLGEHLCFLTNNITSRVALGRTYDERESGIDAKDILEQFLQLLDTFNVGDYIPWLKWVNKITGLDTKVEKIAKKLDTFLDSVIEEHIIRNKKEEYAITDEAKDFVDVLLEIQNGKETDFPLQRDSLKAILLDAFAAGTDTIYTNLDWTMADVLRQPRAMKTLQNEVRGLAQGKSEITEDDLKNMQYLRAVIKESLRLHPPNSLLVPRESMEDVKLLGYYHIPARTQALINVWAIGRDPLSWENPEEFCPERFLNNDIDMKGLKFELLPFGSGRRGCPGSSFAIAVIELALARLVHKFNFALPKGTKPEDLDMTECTGIATRRKSPLPVVATPFSG

SEQ ID NO: 24081 - protein, 507 aa, Solenostemon scutellarioides
MTSLLAHPLLPPPRRRPLPPLLPPPVSHPAGPRPGRWWRNLYDVKPVRFRCFAEWAQLFGPTFSVWFGSTLNVIVSSSELAKEVLKEKDGQLADPPRSRSAVKLSRDGKDLIWADYGPHYVKVRKVCTVVLFSPKRLELLRPIREDEITVMVESIYQDSAASGKSVVIKKYLASMAFHNITRLVFGKRFVNSEGEVDKQGQEFKAIAINGLKLGASLAVSEHIPWLRWMFPLDEDAFTQHGVRMERLTREIMQEHTLARQKTGGAKQHFFDALLTLKDEYDLSEDTIIALLWDMIAAGMDTPAISVEWAMAELVRNPRVQEKVQEELDRVIGHERIMTELDIPNLPYLQCVVKESLRLHPPTPVMLPHRSNADVKIGGYDIPKGSNVHVNVWAIARDPKSWKVPLEFRPERFLEEDVDIKGHDFRLLRFGAGRRVCPGAQLGIDLATSMIGHLLHHFRWTPPTGVRAEDIDMGENPGTVTYMRTPVEAVPTPRLPANLYKRVAVVDI

SEQ ID NO: 24082 - protein, 490 aa, Helianthus tuberosus
MDFLIIVSTLLLSYILIWVLGVGKPKNLPPGPTRLPIIGNLHLLGALPHQSLAKLAKIHGPIMSLQLGQITTLVISSATAAEEVLKKQDLAFSTRNVPDAVRAYNHERHSISFLHVCTEWRTLRRIVSSNIFSNSSLEAKQHLRSKKVEELIAYCRKAALSNENVHIGRAAFRTSLNLLSNTIFSKDLTDPYEDSGKEFREVITNIMVDSAKTNLVDVFPVLKKIDPQGIKRGMARHFSKVLGIFDQLIEERMRTGRFEQGDVLDVCLKMMQDNPNEFNHTNIKALFLDLFVAGTDTTSITIEWAMTELLRKPHIMSKAKEELEKVIGKGSIVKEDDVLRLPYLSCIVKEVLRLHPPSPLLLPRKVVTQVELSGYTIPAGTLVFVNAWAIGRDPTVWDDSLEFKPQRFLESRLDVRGHDFDLIPFGAGRRICPGIPLATRMVPIMLGSLLNNFDWKIDTKVPYDVLDMTEKNGTTISKAKPLCVVPIPLN

SEQ ID NO: 24083 - protein, 477 aa, Helianthus tuberosus
HEWVLGVGKPKNLPPGPTRLPIIGNLHLLGALPHQSLAKLAKIHGPIMSLQLGQITTLVISSATAAEEVLKKQDLAFSTRNVPDAVRAYNHERHSISFLHVCTEWRTLRRIVSSNIFSNSSLEAKQHLRSKKVEELIAYCRKAALSNENVHIGRAAFRTSLNLLSNTIFSKDLTDPYEDSASGKEFREVITNIMVDSAKTNLVDVFPVLKRIDPQGIKRGMARHFSKVLGIFDQLIEERMRTGRFEQGDVLDVCLKMMQDNPNEFNHTNIKALFLDLFVAGTDTTSITIEWAMTELLRKPHIMSKAKEELEKVIGKGSIVKEDDVLRLPYLSCIVKEVLRLHPPSPLLLPRKVVTQVELSGYTIPAGTLVFVNAWAIGRDPTVWDDSLEFKPQRFLESRLDVRGHDFDLIPFGAGRRICPGIPLATRMVPIMLGSLLNNFDWKIDTKVPYDVLDMTEKNGTTISKAKPLCVVPIPLN

SEQ ID NO: 24084 - protein, 518 aa, Oryza sativa
  unsure (1)..(518): unsure at all Xaa locations
MEEGVVGGGGAAVLVALLVTVVLAVMRSAGSRSSKRGRLPPSPMALPIIGHLHLIRPPPHRAFDRILARHGPLVYLRLGPSTHCVVIGSADVARDFLKFEASIPERPPTAVTRQLAYGKAGFAFAPYGAYWRFVKRLCMSELLGPRTVELLRPVRAAELADVLRAAQSAAERGEGVDMSHELVRMANNSIMRMVASALPXXEMAEAARDCAKQVAELVGAFNAEDFVAVCRGWDLQGIGRRTNEVHARFDALLETIIEAKEEARRRSLRLGRRESSSKDLLDMLMDAAEDDTAEVKLTRDNIKAFVLDIFTAGSDTTATTVEWMLAELVNHPECMAKLRGELDAVVGRSRLVGEQDVARLPYLQAVLKETLRLRPPAVFAQRVTVEPVQVRGYTIPTDTQVFFNIFSIGRDATYWDQPLHFRPDRFLPDGAGAIDPKGQHPQLMPFGSGRRACPGMGLAMQAVPAFLAALVQCFDWAPPPSQPLPLDMEEAAGLVSARKHPLLLLPTPRIQPLPSFYS

SEQ ID NO: 24085 - protein, 498 aa, Oryza sativa
  unsure (1)..(498): unsure at all Xaa locations
LALALVVVVVVHVAVNAFGRRRLPPSPASLPVIGHLHLLRPPVHRTFHELAARLGPLMHVRLGSTHCVVASSAEVAAELIRSHEAKISERPLTAVARQXXAYESAGFAFAPYSPHWRFMKRLCMSELLGPRTVEQLRPVRRAGLVSLLRHVLSQPEAEAVDLTRELIRMSNTSIIRMAASTVPSSVTEEAQELVKVVAELVGAFNADDYIALCRGWDLQGLGRRAADVHKRFDALLEEMIRHKEEARMRKXXTDTDVGSKDLLDILLDKAEDGAAEVKLTRDNIKAFIIDVVTAGSDTSAAMVEWMVAELMNHPEALRKVREEIEAVVGRDRIAGEGDLPRLPYLQAAYKETLRLRPAAPIAHRQSTEEIQIRGFRVPAQTAVFINVWAIGRDPAYWEEPLEFRPERFLAGGGGEGVEPRGQHFQFMPFGSGRRGCPGMGLALQSVPAVVAALLQCFDWQCMDNKLIDMEEADGLVCARKHRLLLHAHPRLHPFPPLL

SEQ ID NO: 24086 - protein, 531 aa, Sorghum bicolor
MATTATPQLLGGSVPQQWQTCLLVLLPVLLVSYYLLTSRSRNRSRSGKLGGAPRLPPGPAQLPILGNLHLLGPLPHKNLRELARRYGPVMQLRLGTVPTVVVSSAEAAREVLKVHDVDCCSRPASPGPKRLSYDLKNVGFAPYGEYWREMRKLFALELLSMRRVKAACYAREQEMDRLVADLDRAAASKASIVLNDHVFALTDGIIGTVAFGNIYASKQFAHKERFQHVLDDAMDMMASFSAEDFFPNAAGRLADRLSGFLARRERIFNELDVFFEKVIDQHMDPARPVPDNGGDLVDVLINLCKEHDGTLRFTRDHVKAIVLDTFIGAIDTSSVTILWAMSELMRKPQVLRKAQAEVRAAVGDDKPRVNSEDAAKIPYLKMVVKETLRLHPPATLLVPRETMRDTTICGYDVPANTRVFVNAWAIGRDPASWPAPDEFNPDRFVGSDVDYYGSHFELIPFGAGRRICPGLTMGETNVTFTLANLLYCYDWALPGAMKPEDVSMEETGALTFHRKTPLVVVPTKYKNRRAA

SEQ ID NO: 24087 - protein, 534 aa, Zea mays
  unsure (1)..(534): unsure at all Xaa locations
MEEQQPRPRPSIMFVLSSLAKNNPESVLALIAVLTVVALRHLISSWRQQARLPPSPTSLPVIGHLHLLRPPVHRTFQELASRIGPLMHIRLGSTHCVVASTPXEVASELIRGHEGSISERXGFTAVARQFAYDSAGFAFAPYNTHWRFMKRLCMSELLGPRTVEQLRPVRRAGXTVSLLADLLASSARGETVDLTRHLIRLSNTSIIRMVASTVPGSVTDEAQEVVKDVAELVGAFNVDDYISLVRGWDLQGLRRRAAGVHRRFDALLEDILRHKEEARASKQDKKQATHSKDLLDILMDKADDPAAEIKLTRENIKAFIIDVVTAGSDTSAAMVEWMLAELMNHPETLRKVAEEIDAVVGGDRIASEADLPQLPYLMAAYKETLRLHPAAPIAHRQSSEEMVVRGFTVPPQTAVFINVWAIGRDPAYWEEPLAFRPERFMPGGAAESLEPRGQHFQYMPFGSGRRGCPGMGLALQSVPAVLAALVQCFHWATVDGDGGVNKIDMSESDGLVCARKKPLLLRPTPRLTPFPAVV

SEQ ID NO: 24088 - protein, 523 aa, Glycyrrhiza echinata
MLVELAITLLVIALFIHLRPTLSAKSKSLRHLPNPPSPKPRLPFVGHLHLLDKPLLHYSLIDLSKRYGPLYSLYFGSMPTVVASTPELFKLFLQTHEASSFNTRFQTSAIRRLTYDNSVAMVPFGPYWKFIRKLIMNDLLNATTVNKLRPLRSQEIRKVLRVMAQSAESQVPLNVTEELLKWTNSTISRMMLGEAEEIRDIARDVLKIFGEYSLTDFIWPLKKLKVGQYEKRIDDIFNRFDPVIERVIKKRQEIRKKRKERNGEIEEGEQSVVFLDTLLDFAEDETMEIKITKEQIKGLVVDFFSAGTDSTAVATDWALSELINNPRVFQKAREEIDAVVGKDRLVDEADVQNLPYIRSIVKETFRMHPPLPVVKRKCVQECEVDGYVIPEGALILFNVWAVGRDPKYWDRPTEFRPERFLENVGEGDQAVDLRGQHFQLLPFGSGRRMCPGVNLATAGMATLLASVIQCFDLSVVGPQGKILKGNDAKVSMEERAGLTVPRAHNLICVPVARSSAVPKLFSS

SEQ ID NO: 24089 - protein, 523 aa, Glycyrrhiza echinata
MEPQLVAVSVLVSALICYFFFRPYFHRYGKNLPPSPFFRLPIIGHMHMLGPLLHQSFHNLSHRYGPLFSLNFGSVLCVVASTPHFAKQLLQTNELAFNCRIESTAVKKLTYESSLAFAPYGDYWRFIKKLSMNELLGSRSINNFQHLRAQETHQLLRLLSNRARAFEAVNITEELLKLTNNVISIMMVGEAEEARDVVRDVTEIFGEFNVSDFIWLFKKMDLQGFGKRIEDLFQRFDTLVERIISKREQTRKDRRRNGKKGEQGSGDGIRDFLDILLDCTEDENSEIKIQRVHIKALIMDFFTAGTDTTAISTEWALVELVKKPSVLQKVREEIDNVVGKDRLVEESDCPNLPYLQAILKETFRLHPPVPMVTRRCVAECTVENYVIPEDSLLFVNVWSIGRNPKFWDNPLEFRPERFLKLEGDSSGVVDVRGSHFQLLPFGSGRRMCPGVSLAMQEVPALLGAIIQCFDFHVVGPKGEILKGDDIVINVDERPGLTAPRAHNLVCVPVDRTSGGGPLKIIEC

SEQ ID NO: 24090 - protein, 523 aa, Glycyrrhiza echinata
MEPQLVAVSVLVSALICYFFFRPYFHRYGKNLPPSPFFRLPIIGHMHMLGPLLHQSFHNLSHRYGPLFSLNFGSVLCVVASTPHFAKQLLQTNELAFNCRIESTAVKKLTYESSLAFAPYGDYWRFIKKLSMNELLGSRSINNFQHLRAQETHQLLRLLSNRARAFEAVNITEELLKLTNNVISIMMVGEAEEARDVVRDVTEIFGEFNVSDFIWLFKKMDLQGFGKRIEDLFQRFDTLVERIISKREQTRKDRRRNGKKGEQESGDGIRDFLDILLDCTEDENSEIKIQRVHIKALIMDFFTAGTDTTAISTEWALVELVKKPSVLQKVREEIDNVVGKDRLVEESDCPNLPYLQAILKETFRLHPPVPMVTRRCVAECTVENYVIPEDSLLFVNVWSIGRNPKFWDNPLEFCPERFLKLEGDSSGVVDVRGSHFQLLPFGSGRRMCPGVSLAMQEVPALLGAIIQCFDFQVVGPKGEILKGDDIVINVDERPGLTAPRAHNLVCVPVERRSGGGPLKIIEC

SEQ ID NO: 24091 - protein, 501 aa, Asparagus officinalis
MTVSITAAVQLFLLLLLLLQLLFVHHKTKPKTKCRSPPGPPPLPVIGNLHQLSLLLHQSLYRLSKIHGPIFKLSLGRVPVLVISSPSLAKQVLKTHDLAFCSRASTVSFKEYTYDGCDVAGAPYGDSWRNLRKIFVLNLLSSKKLTSFRLVQEEEIEGMISSIRTRSDTNATVNITEFVVRLANNITFRVAFGYRSEGEYGEKSRFQRLLESGNDTVASFYVGDYFPGLGWLDKITGKLGKMKRNARDLDEFYQEVIDAHMKDGRKEDGKEDIVDVLLRLREEGQLTMDHIKGALMNIFVGGTDTSAASIAWAMAELARKPKVMKKAQEEVRKAASKKGKVEENDLAQLQYIKCVVNETLRLHLPLPLLVPRETIQHCEINGYDVSAKTRVLVNAWAIGRDEDAWENPEEFNPDRFVGSSLDYKGQDFQFIPFGAGRRICPGIQFGVETVELALANLLYAFNWELPPGVERENIDMHEAPGLVTRRATDLRLVATNYEEAN

SEQ ID NO: 24092 - protein, 501 aa, Asparagus officinalis
MTVSITAAVQLFLLLLLLLPLLFVHHKTKPKTKCRSPPGPPPLPVIGNLHQLSLLLHQSLYRLSKIHGPIFKLSLGRVPVLVISSPSLAKQVLKTHDLACCSRASTVSFKEYTYDGCDVAGAPYGDSWRNLRKIFVLKLLSSKKLTSFRLVQEEEIEGMISSIRTRSDTNATVNITEFVVRLANNITFRVAFGYRSEGEYGEKSRFQRLLESGNDTVASFYVGDYFPGLGWLDKMTGKLGKMKRNARDLDEFYQEVIDAHMKDGRKEDGKEDIVDVLLRLREEGQLTMDHIKGALMNIFVGGTDTSAASIAWAMAELARKPKVMKKAQEEVRKAASKKGKVEENDLAQLQYIKCVVNETLRLHLPLPLLVPRETIQHCEINGYDVSAKTRVLVNAWAIGRDEDAWENPEEFNPDRFVGSSLDYKGQDFQFIPFGAGRRICPGIQFGVETVELALANLLYAFNWELPPGVERENIDMHEAPGLVTRRATDLRLVATNYEEAN

SEQ ID NO: 24093 - protein, 230 aa, Lotus corniculatus
MTVAGYLNIGDFIPPLEWLDLQGVQGKMKKLHNRFDAFFAHIIEEQKVILKSEKHQDLLSTLLSLKEAPEDGDKLNDTEIKALLLNLFTAGTDTSSSTAEWAIAELIKNPRIMGQVQQELDNVVGKDKLVTELDMPNLPYLEAVVKETFRLHPSTPLSLPRAAAKSCEVFDYHIPKGATLLVNVWAISRDPKEWASPLEFRPERFLPGGEKASVDVRGTDFALIPFGAGR

SEQ ID NO: 24094 - protein, 201 aa, Brassica rapa subsp. pekinensis
PGTDTAAAVVVWAMTYLIKYPEAMKKAQDEVRNVVGDKGYVSEEDIPNLPYLKAVIKESLRLEPVIPILLHRETIADAKIGGYDIPAKTIIQVNAWAVSRDTAAWGDNPNEFIPERFMNEQKGVDFKGQDFELLPFGSGRRMCPAMHLGVAMVEIPFANLLYRFDWSLPKGIKPEDIKMDVMTGLAMHKKDHLVLAPRTHI

SEQ ID NO: 24095 - protein, 500 aa, Euphorbia lagascae
MEQKNLSFPSILISFLLVLILVVVMRLWKKQNPPPGPWKFPIIGNLPHLLLTSDLGHERFRALAQIYGPVMSLQIGQVSAVVISSAEAAKEVMKTQADAFAQRPIVLDAQIVFYNRKDVLFASYGDHWRQMKKIWILEFLSAKKVQSSRLIREEEMEDAITFLRSKAGSPVNITKIIYGIIISIMIRTSVGNCKQKERLLSVADAVNEAATSFGTADAFPTWKLLHYIIGAESKPRRLHQEIDDILEEILNEHKANKPFEADNLMDVLLNLQKNGNVPVPVTNESIKASVLQMFTAGSETTSKATEWVMAELMKNPTELRKAQEEVRQVFGEMGKVDESRFHDLKFFKLVVKETLRLHPPVVLIPRECRETTRIDGYEIHPNTRIVVNAWAIGRDPNTWSEPGKFNPERFKDCAIDYKGTTFELVPFGAGKRICPGITSAITNLEYVIINLLYHFNWELADGITPQTLDMTEAIGGALRKKIDLKLIPIPYQVSLGSNIS

SEQ ID NO: 24096 - protein, 509 aa, Nepeta racemosa
MVSLSYFLIALLCTLPFLLFLNKWRRSYSGKTPPPSPPKLPVIGNLHQLGLYPHRYLQSLSRRYGPLMQLHFGSVPVLVASSPEAAREIMKNQDIVFSNRPKMSIANRLFFNNRDVAFTQYGEYWRQIRSICVLQLLSNKRVQSFRRVREEETSIMVEKIMQLGSSSSTPVNLSELLLSLTNDVVCRVTLGKKYGGGNGSEEVDKLKEMLTEIQNLMGISPVWEFIPWLNWTRRFDGVDQRVDRIVKAFDGFLESVIQEHKERDGDKDGDGDGALDFVDILLQFQRENKNRSPVEDDTVKALILDMFVAGTDTTATALEWAVAELIKNPRAMKRLQNEVREVAGSKAEIEEEDLEKMPYLKASIKESLRLHVPVVLLVPRESTRDTNVLGYDIASGTRVLINAWAIARDPSVWENPEEFLPERFLDSSIDYKGLHFELLPFGAGRRGCPGATFAVAIDELALAKLVHKFDFGLPNGARMEELDMSETSGMTVHKKSPLLLLPIPHHAAP

SEQ ID NO: 24097 - protein, 511 aa, Nepeta racemosa
ILIALLCTLPFLFFLKKWRRSYSGKTPPPSPPKLPVLGNLHQLGTFPHRSLQSLSRRYGPVMQLHFGSVPVLVASSPEAAREIMKNQDLNFSNRPNLSIPRRLLYDNHDVAFAPYGEYWRQIRSICVLQLLSNKRVQSFRRVREEETSIMVEKIMQLQKTTPTAAVNLTDLLTCLTNDVFCRIALGKKYGGTTTGDGEYHVRSLKKNLAEFYVLLGISPLWEYIPWLEWTRRFDGVDRRIEEVSRTFDEFLGKVIQEHRVRDKREDTTVVGDTVGLDFVDLLLQFQRENERSSSPVDDLTIKAVILDMFLAGTDTTVTALEWALSELIKNPRAMKILQKEVRGVAGSKGEIEESDLEKMPYLKAVMKESLRLHAPVPLLVPRESTRDTKVLGYDVASGTRVLINCWAIGRDSSVWEESETFLPERFLETSIDYRGMHFELIPFGSGRRGCPGATFAAAIDELALATLVHKFDFKLPNGVRVEDLDMSEGSGFTIHKKFPLLVVPTPHACTS

SEQ ID NO: 24098 - protein, 523 aa, Campanula medium
MSIDISTLFYELVAAISLYLATYSFIRFLFKPSHHHHLPPGPTGWPIIGALPLLGTMPHVSLADMAVKYGPIMYLKLGSKGTVVASNPKAARAFLKTHDANFSNRPIDGGPTYLAYNAQDMVFAEYGPKWKLLRKLCSLHMLGPKALEDWAHVKVSEVGHMLKEMYEQSSKSVPVPVVVPEMLTYAMANMIGRIILSRRPFVITSKLDSSASASASVSEFQYMVMELMRMAGLFNIGDFIPYIAWMDLQGIQRDMKVIQKKFDVLLNKMIKEHTESAHDRKDNPDFLDILMAATQENTEGIQLNLVNVKALLLDLFTAGTDTSSSVIEWALAEMLNHRQILNRAHEEMDQVIGRNRRLEQSDIPNLPYFQAICKETFRKHPSTPLNLPRISTEACEVDGFHIPKNTRLIVNIWAIGRDPKVWENPLDFTPERFLSEKHAKIDPRGNHFELIPFGAGRRICAGARMGAASVEYILGTLVHSFDWKLPDGVVEVNMEESFGIALQKKVPLSAIVTPRLPPSSYTV

SEQ ID NO: 24099 - protein, 453 aa, Arabidopsis lyrata subsp. petraea
MESSISQTLSKVSDPTTALLIVVSLFIFIGFITRRRRPPYPPGPRGWPIIGNMLMMDQLTHRGLANLAKKYGGLCHLRMGFLHMYAVSSPDVARQVLQVQDSVFSNRPATIAISYLTYDRADMAFAHYGPFWRQMRKVCVMKVFSRKRAESWASVRDEVDKMVRSVSCNVGKPINVGEHIFALTRNITYRAAFGSACEKGQDEFIRILQEFSKLFGAFNVADFIPYFGWIDPQGINKRLVKARNDLDGFIDDIIDEHMKKKENQNAVDDGDVVDTDMVDDLLAFYSEEAKLVSEAADLQNSIKLTRDNIKAIIMDVMFGGTETVASAIEWALTELLRSPEDLKRVQQELAEVVGLDRRVEEADIEKLTYLKCTLKETLRMHPPIPLLLHETAEDTSIDGFFIPKKSRVMINAFAIGRDPTSWADPDTFRPSRFLEPGVPDFKGSNFEFIPFGS

SEQ ID NO: 24100 - protein, 538 aa, Drosophila melanogaster
MLADSYLIKFVLRQLQVQEDGDAQHLLMVFLGLLALVTLLQWLVRNYRELRKLPPGPWGLPVIGYLLFMGSEKHTRFMELAKQYGSLFSTRLGSQLTVVMSDYKMIRECFRREEFTGRPDTPFMQTLNGYGIINSTGKLWKDQRRFLHDKLRQFGMTYMGNGKQQMQKRIMTEVHEFIGHLHASDGQPVDMSPVISVAVSNVICSLMMSTRFSIDDPKFRRFNFLIEEGMRLFGEIHTVDYIPTMQCFPSISTAKNKIAQNRAEMQRFYQDVIDDHKRSFDPNNIRDLVDFYLCEIEKAKAEGTDAELFDGKNHEEQLVQVIIDLFSAGMETIKTTLLWINVFMLRNPKEMRRVQDELDQVVGRHRLPTIEDLQYLPITESTILESMRRSSIVPLATTHSPTRDVELNGYTIPAGSHVIPLINSVHMDPNLWEKPEEFRPSRFIDTEGKVRKPEYFIPFGVGRRMCLGDVLARMELFLFFASFMHCFDIALPEGQPLPSLKGNVGATITPESFKVCLKRSPLGPTAADPHHMRNVGAN

SEQ ID NO: 24101 - protein, 538 aa, Drosophila melanogaster
MLADSYLIKFVLRQLQVQQDGDAQHLLMVFLGLLALVTLLQWLVRNYRELRKLPPGPWGLPVIGYLLFMGSEKHTRFMELAKQYGSLFSTRLGSQLTVVMSDYKMIRECFRREEFTGRPDTPFMQTLNGYGIINSTGKLWKDQRRFLHDKLRQFGMTYMGNGKQQMQKRIMTEVHEFIGHLHASDGQPVDMSPVISVAVSNVICSLMMSTRFSIDDPKFRRFNFLIEEGMRLFGEIHTVDYIPTMQCFPSISTAKNKIAQNRAEMQRFYQDVIDDHKRSFDPNNIRDLVDFYLCEIEKAKAEGTDAELFDGKNHEEQLVQVIIDLFSAGMETIKTTLLWINVFMLRNPKEMRRVQDELDQVVGRHRLPTIEDLQYLPITESTILESMRRSSIVPLATTHSPTRDVELNGYTIPAGSHVIPLINSVHMDPNLWEKPEEFRPSRFIDTEGKVRKPEYFIPFGVGRRMCLGDVLARMELFLFFASFMHCFDIALPEGQPLPSLKGNVGATITPESFKVCLKRRPLGPTAADPHHMRNVGAN

SEQ ID NO: 24102 - protein, 522 aa, Salmo salar
MVLMILPIIGSVSVSEGLVAMVTLCLVYMFMKYKHTEIPEGLKRLPGPKPLPIIGNVLEVHNNPHLSLTAMSERYGSVFQIQIGMRPVVVLSGSETVRQALIKQGEDFAGRPDLYSFKFINDGKSLAFSTDKAGVWRARRKLAMSALRSFATLEGSTPEYSCALEEHVCKEGEYLVKQLTSVMDVSGSFDPFRHIVVSVANVICGMCFGRRYSHDDQELLSLVNLSDEFGQVVGSGNPADFIPILRYLPNRTMKRFMDINDRFNAFVQKIVSEHYESYDKDNIRDITDSLIDHCEDRKLDENANIQVSDEKIVGIVNDLFGAGFDTISTALSWAVVYLVAYPEIQERLHQELTEKVGLNRTPRLSDKTNLPLLEAFILEIFRHSSFLPFTIPHCTIKDTSLNGYFIPKDTCVFINQWQVNHDPELWKEPSLFNPDRFLSADGTELNKLEGEKVLVFGMGKRRCIGEAIGRNEVYLFLAILLQRLRFQEKPGHPLDMTPEYGLTMKHKRCQLKASLRPWGQEE

SEQ ID NO: 24103 - protein, 469 aa, Capsicum chinense
PIPVPVFGNWLQVGDDLNHRNLTDYAKKFGDIFLLRMGQRNLVVVSSPESAKEVLHTQGVEFGSRTRNVVFDIFTGKGQDMVFTVYGEHWRKMRRIMTVPFFTNKVVQQYRGGWESEVASVVEDVKKNPESATNGIFLRKRLQLMMYNNMFRIMFDRRFESEDDPLFVKLRALNGERSRLAQSFEYNYGDFIPIFRPFLRGYLKICKEVKEKRLQLFKDYFVDERKKLANTKSMDSNALTCAIHHILDAQQKGEINEDNVLYIVENINVAAIQTTLWSIEWGIAELVNHPHIQQKLREEIDTVLGPGVQVTEPDTQKLPYLQAVIKETLRLRMAIPLLVPHMSLHDAKLAVYDIPAESKILVNAWWLANNPAHWKKPEEFRPERFLEEEKHVDANGNDFRFLPFGVGRRSCPGIILALPILGITLGRLVQNFEMFPPPGQSKLDTSEKGGQFSLHILKHSTIVMKPRSF

SEQ ID NO: 24104 - protein, 521 aa, Fundulus heteroclitus
MALMILPFIGALSVSEGLIALVTVCLVYLTLKHFRREIPEGLRRLPGPTPLPIIGNFLELGSKPYLSLTEMSKRFGDVFQIQLGMRPVVILSGYETVKQALTKQGDDFAGRPDLYSFRFINDGKSLAFSTDKAGVWRARRKLAYSALRSFSSLEGKLPEYSCVLEEHICKETEHLIKELHNVMTAEGKFDPFRYIVVSVANVICGMCFGRRYDHHNQELLSLVNLAEDFVQVTGSGNPADFIPALQFLPNKSMKKFVNLNNRFNNFVQKIVSEHYSTFDKDNIRDITDSLIDHCEDRKLDENSNIQMSDEKIVGIVNDLFGAGFDTISTALSWAVMYLVAYPEVEERLYEEIKEKVGLDRTPVMSDRSNLPLLESFILELFRHSSYLPFTIPHCSTKDTSLNGYFIPKDTCVFVNQWQINHDPELWKDPSMFIPDRFLSADGTEVNKQEGEKVLIFGLGRRRCIGEVIARNEVFLFLAIIIQKLHFYKLPGEPVDMTPEYGLTMKHKRCYLGVAMRAKDVQ

SEQ ID NO: 24105 - protein, 208 aa, Populus x canescens
LIAGGTESSAVTVEWAISEILRKPEVFEKATEELDRVIGRERWVEEKDMVNLPYIYAIAKEVMRLHPVAPMLVPRAAREDININGYDIKKGSRVLVNVWTIGRDPKVWDKPDEFFPERFIGNSIDVRGHDYELLPFGAGRRMCPGYPLGLKVIQATLSNLLHGFKWRLPDGQKKEDLNMDEIFGLSTPKKYPLVAVAEPRLPAHVYPK

SEQ ID NO: 24106 - protein, 511 aa, Xenopus laevis
MISYVAGALLLAFGLALISVWKFAGGKHRGAKYPNSLPCLPFIGSLLHIGNHLPPHILFCKLQEKYGSLYSFRMGSHYIVIVNHHEHAKEVLLKKGKTFGGRPRAVTTDILTRNAKDIAFANYSPSWKFHRKVVHAALSMFGEGTVAIEKIISREATSLCQSLISFQDNPLDMAPELTRAVTNVVCALCFNTRYKRCDPEFEEMLAYSKGIVDTVAKDSLVDIFPWLQIFPNKDLDILKRSVAIRDKLLQKKLKEHKEAFCNEEVNDLLDALLKAKLSMENNNSNISQEVGLTDDHLLMTVGDIFVAGVETTTTVLKWTMAYLLHYPEVQTKIQEELDFKVGFGRHPVLSDRRILPYLDATISEVLRIRPVAPLLIPHVALQESSIAEYTIPQDARVVINLWSLHHDPNEWENPEEFNPERFLDENGNHVYSPSQSYLPFGAGIRVCLGEALAKMEVFLFLSWILQRFTLELPAGDSLPDLDGKFGVVLQVKKFRVTTKLREAWKNIDLTT

SEQ ID NO: 24107 - protein, 508 aa, Gallus gallus
MPPLAVLLLALALLCAWRLSYSQGPTGTGTGRPRSLPALPLVGSLLQLAGHPQLHLRLWRLQGRYGSLYGLWMGSHYVVVVNSYQHAREVLLKKGKAFAGRPRTVTTDLLSRGGKDIAFASYGPLWKFQRKLVHAALSMFGEGSVALEKIICREAASLCETLGAAQDMALDMAPELTRAVTNVVCSLCFNSSYRRGDPEFEAMLEYSQGIVDTVAKESLVDIFPWLQIFPNRDLALLKRCLKVRDQLLQQKFTEHKEAFCGDTVRDLMDALLQVRLNAENNSPLEPGLELTDDHLLMTVGDIFGAGVETTTTVLKWAVLYLLHYPEVQKKIQEEMDQKIGLARHPHLSDRPLLPYLEATISEGLRIRPVSPLLIPHVSLADTSIGEYSIPKGARVVINLWSVHHDEKEWDKPEEFNPGRFLDEQGQHIHSPSPSYLPFGAGIRVCLGEVLAKMELFLFLAWVLQRFTLECPQDQPLPSLEGKFGVVLQVQKFRVKARLREAWRGEMVR

SEQ ID NO: 24108 - protein, 516 aa, Oryctolagus cuniculus
MAMSPAAPLSVTELLLVSAVFCLVFWAVRASRPKVPKGLKRLPGPWGWPLLGHLLTLGKNPHVALARLSRRYGDVFQIRLGSTPVVVLSGLDTIKQALVRQGDDFKGRPDLYSSSFITEGQSMTFSPDSGPVWAARRRLAQDSLKSFSIASNPASSSSCYLEEHVSQEAENLIGRFQELMAAVGRFDPYSQLVVSAARVIGAMCFGRRFPQGSEEMLDVVRNSSKFVETASSGSPVDFFPILRYLPNRPLQRFKDFNQRFLRFLQKTVREHYEDFDRNSIQDITGALFKHSEKNSKANSGLIPQEKIVNLVNDIFGAGFDTITTALSWSLMYLVTNPRRQRKIQEELDAVVGRARQPRLSDRPQLPYLEAFILELFRHTSFVPFTIPHSTTRDTTLNGFHIPKECCIFINQWQINHDPQLWGDPEEFRPERFLTADGAAINKPLSEKVTLFGLGKRRCIGETLARWEVFLFLAILLQRLEFSVPPGVPVDLTPIYGLTMKHPRCEHVQARPRFSDQ

SEQ ID NO: 24109 - protein, 518 aa, Oryctolagus cuniculus
MVSDFGLPTFISATELLLASAVFCLVFWVAGASKPRVPKGLKRLPGPWGWPLLGHVLTLGKNPHVALARLSRRYGDVFQIRLGSTPVVVLSGLDTIKQALVRQGDDFKGRPDLYSFSFVTKGQSMIFGSDSGPVWAARRRLAQNALNSFSVASDPASSSSCYLEEHVSQEAENLISKFQELMAAVGHFDPYRYVVMSVANVICAMCFGRRYDHDDQELLSLVNLNDEFGKVAASGSPADFFLILRYLPNPALDTFKDLNERFYSFTQERVKEHCRSFEKGHIRDITDSLIKHYRVDRLDENANVQVSDEKTVGIVLDLFGAGFDTVTTAISWSLMYLVTKPRIQRKIQEELDAVVGRARRPRFSDRPQLPYLEAVIMETFRHTSFLPFTIPHSTTRDTSLGGFYIPKGRCVFVNQWQNNHDPELWGDPEAFRPERFLTPSGAVDKALTEKVLLFGLGKRKCIGETIGRLEVFLFLATLLQQVEFSVSPGTTVDMTPIYGLTMKHARCEHFQAKLRFEA

SEQ ID NO: 24110 - protein, 516 aa, Oryctolagus cuniculus
MAMSPAAPLSVTELLLVSAVFCLVFWAVRASRPKVPKGLKRLPGPWGWPLLGHLLTLGKNPHVALARLSRRYGDVFQIRLGSTPVVVLSGLDTIKQALVRQGDDFKGRPDLYSSSFITEGHSMTFSPDSGPVWAARRRLAQDSLKSFSIASNPASSSSCYLEEHVSQEAENLIGRFQELMAAVGRFDPYSQLVVSAARVIGAMCFGRRFPQGSEEMLDVVRNSSKFVETASSGSPVDFFPILRYLPNRPLQRFKDFNQRFLRFLQKTVREHYEDFDRNSIQDITGALFKHSEKNSKANSGLIPQEKIVNLVNDIFGAGFDTITTALSWSLMYLVTNPRRQRKIQEELDAVVGRARQPRLSDRPQLPYLEAFILELFRHTSFVPFTIPHSTTRDTTLNGFHIPKECCIFINQWQINHDPQLWGDPEEFRPERFLTADGAAINKPLSEKVTLFGLGKRRCIGETLARWEVFLFLAILLQRLEFSVPPGVPVDLTPIYGLTMKHPRCEHVQARPRFSDQ

SEQ ID NO: 24111 - protein, 341 aa, Mus musculus
MSLHGKRKEIYKYEAPWTVYAMNWSVRPDKRFRLALGSFVEEYNNKVQLVGLDEESSEFICRNTFDHPYPTTKLMWIPDTKGVYPDLLATSGDYLRVWRVGETETRLECLLNNNKNSDFCAPLTSFDWNEVDPYLLGTSSIDTTCTIWGLETGQVLGRVNLVSGHVKTQLAHDKEVYDIAFSRAGGGRDMFASVGADGSVRMFDLRHLEHSTIIYEDPQHHPLLRLCWNKQDPNYLATMAMDGMEVVILDVRVPCTPVARLNNHRACVNGIAWAPHSSCHICTAADDHQALIWDIQQMPRAIEDPILAYTAEGEINNVQWASTQPDWIAICYNNCLEILRV

SEQ ID NO: 24112 - protein, 353 aa, Rattus norvegicus
MSLHGKRKEIYKYEAPWTVYAMNWSVRPDKRFRLALGSFVEEYNNKGFVSHVGESCEEWPHKALKSAVEEQSGTIHTDLRRHSYSNGDYLRVWRVGETETRLECLLNNNKNSDFCAPLTSFDWNEVDPYLLGEGFEFQLEENEDTFPQIRPIDTTCTIWGLETGQVLGRVNLVSGHVKTQLIAHDKEVYDIAFSRAGGGRDMFASVGADGSVRMFDLRHLEHSTIIYEDPQHHPLLRLCWNKQDPNYLATMAMDGMEVVILDVRVPCTPVARLNNHRACVNGIAWAPHSSCHICTAADDHQALIWDIQQMPRAIEDPILAYTAEGEINNVQWASTQPDWIAICYNNCLEILRV

SEQ ID NO: 24113 - protein, 325 aa, Anopheles gambiae str. PEST
MSGTTGKRKEIYKYLAPWPLYSMNWSVRPDKRFRLALGSFVEEYNNKVQIISLDEDTSEFSAKSTFDHPYPTTKIMWIPDSKGVYPDLLATSGDYLRLWRAGEPDTRLECVLNNNKNSDFCAPLTSFDWNEVDLNLVGTSSIDTTCTIWGLETSQPLGRVNLVSGHVKTQLIAHDKEVYDIAVRMFDLRHLEHSTIIYEDPAHTPLLRLAWNKQDPNYLATVAMDSCEVIILDVRVPCTPVARLSNHRACVNGIAWAPHSSCHICTAGDDHQALIWDIQQMPRPIEDPILAYTAAEGEVNQIQWGATQPDWIAICYKTACEILRV

SEQ ID NO: 24114 - protein, 377 aa, Giardia lamblia ATCC 50803
MPNFSVMLLSSSTSLYALKISASSESIHSERVLNACPQLKKNQAPQMSGRCFTFSAHGPLYGLSWSCRTDMPMRLAISTISDACPNEFSIISLQKERRDFRVVASASVVYPLSKIQFLPSKDVSNPDLIATVSDSLRIFEIDNLKDDGRAELCSRGRLLVNETRPVPILSMDWCAHSLNIIMTANLDTTVSLWDIYKQEVDIRFVAQERAVTDCCFSLKDPNRFLTCGAEGNLRLYDRRRMHVANEIYTGNEAILRAQFKPTDSNFITCFGEKSTDIILLDARSTVKPLARLKGHTDYINGISWGRDSHGGYFVSVANDGRALIWDGGSGTYTPFMEYVATSASGEPLGPINSVDWNQSNHDWVALTVDDEVQILHV

SEQ ID NO: 24115 - protein, 345 aa, Gossypium hirsutum
MENSTQESHLRSDNSVTYESAYTVYAMALSSTPSSTNINHQRIALGSFLEDYTNRVDIISFDPETLSFKTHPKLAFDHPYPPTKLMFQPNRKSASSSSSCSDLLASTGDFLRLWEVRESSIEPVTVLNNSKTSEFCAPLTSFDWNDVEPKRIGTSSIDTTCTIWDIEKCVVETQLIAHDKEVYDIAWGEARVFASVSADGSVRIFDLRDKEHSTIIYESPQPDTPLLRLAWNKQDLKYMATIQMDSNKVVILDIRSPTTPVAELERHHASVNAIAWAPQSCKHICSAGDDTQALIWELPTVAGPNGIDPLCVYSAGYEINQLQWSAAQPDWIAIAFSNKLQLLKV

SEQ ID NO: 24116 - protein, 345 aa, Gossypium hirsutum
MENSTQESHLRSDNSVTYESAYTVYAMALSSTPSSTNINHQRIALGSFLEDYTNRVDIISFDPETLSFKTHPKLAFDHPYPPTKLMFQPNRKSASSSSSCSDLLASTGDFLRLWEVRESSIEPVTVLNNSKTSEFCAPLTSFDWNDVEPKRIGTSSIDTTCTIWDIEKCVVETQLIAHDKEVYDIAWGEARVFASVSADGSVRIFDLRDKEHSTIIYESPQPDTPLLRLAWNKQDLKYMATIQMDSNKVVILDIRSPTTPVAELERHHASVNAIAWAPQSCKHICSAGDDTQALIWELPTVAGPNGIDPLCVYSAGYEINQLQWSRAQPDWIAIAFSNKLQLLKV

SEQ ID NO: 24117 - protein, 343 aa, Gossypium hirsutum
MENSTQESHLRSDNAVTYESPYPLYAMALSSTPAVTHLNYQRIALGSFIEDYTNRVHIISFDPESLTLITHPSLSFDHPYPPTKLMFQPHRKSPFSSSSDLLASSGDYLRLWEVGHSSIELISVLDNSKTSEFSAPLTSFDWNDVEPNRIGTSSIDTTCTIWDIEKGVVETQLIAHDKEVYDIAWGEGRVFGSVSADGSVRIFDLRDKEHSTIIYESPQPDTPLLRLAWNKQDLRYMATTLMDSNKVVILDIRSPTTPVAELDRHGASVNAIAWAPQSCKHICSAGDDTHALIWELPTVAGPNGIDPLSMYSASSEINQLQWSAAQPDWIAIAFSNKMQLLKV

SEQ ID NO: 24118 - protein, 341 aa, Gossypium hirsutum
NSTQESHLRSDNAVTYESPYPLYAMALSSTPAVTHLNHQRIALGSFIEDYANRVHIISFDPESLTLTTHPSLSFDHPYPPTKLMFQPHRKSPFSSSSDLLASSGDYLRLWEVGHSSIELISILDNSKTSEFSAPLTSFDWNDVEPNRIGTSSIDTTCTIWDIEKGVVETQLIAHDKEVYDIAWGEARVFGSVSADGSVRIFDLRDKEHSTIIYESPQPDTPLLRLAWNKQDLRYMATTLMDSNKVVILDIRSPTMPVAELDRHGASVNAIAWAPQSYKHICSAGDDTHALIWELPTVAGPNGIGPLSMYSASSEINQLQWSATQPDWIAIAFSNKMQLLKV

SEQ ID NO: 24119 - protein, 341 aa, Arabidopsis thaliana
MDNSAPDSLSRSETAVTYDSPYPLYAMAFSSLRSSSGHRIAVGSFLEDYNNRIDILSFDSDSMTVKPLPNLSFEHPYPPTKLMFSPPSLRRPSSGDLLASSGDFLRLWEINEDSSTVEPISVLNNSKTSEFCAPLTSFDWNDVEPKRLGTCSIDTTCTIWDIEKSVVETQLIAHDKEVHDIAWGEARVFASVSADGSVRIFDLRDKEHSTIIYESPQPDTPLLRLAWNKQDLRYMATILMDSNKVVILDIRSPTMPVAELERHQASVNAIAWAPQSCKHICSGGDDTQALIWELPTVAGPNGIDPMSVYSAGSEINQLQWSSSQPDWIGIAFANKMQLLRV

SEQ ID NO: 24120 - protein, 341 aa, Arabidopsis thaliana
MDNSAPDSLSRSETAVTYDSPYPLYAMAFSSLRSSSGHRIAVGSFLEDYNNRIDILSFDSDSMTVKPLPNLSFEHPYPPTKLMFSPPSLRRPSSGDLLASFGDFLRLWEINEDSSTVEPISVLNNSKTSEFCAPLTSFDWNDVEPKRLGTCSIDTTCTIWDIEKSVVETQLIAHDKEVHDIAWGEARVFASVSADGSVRIFDLRDKEHSTIIYESPQPDTPLLRLAWNKQDLRYMATILMDSNKVVILDIRSPTMPVAELERHQASVNAIAWAPQSCKHICSGGDDTQALIWELPTVAGPNGIDPMSVYSAGSEINQLQWSSSQPDWIGIAFANKMQLLRV

SEQ ID NO: 24121 - protein, 342 aa, Malus x domestica
MENSTQESHLRAENSVTYESPYPLYAMAFASPQTRTRHQHHRIAVGSFIEEYSNRVDILSFDPDTLSIKPNPTLSFDHPYPPTKLMFHPNPNALHKTNDVLASSGDYLRLWEVGDSTVEPIQVLNNSKTSEFCAPLTSFDWNDIEPRRIGTSSIDTTCTIWDIEKGVVETQLIAHDKEVYDIAWGEARVFASVSADGSVRIFDLRDKEHSTIIYESPQPDTPLLRLAWNKQDLRYMATILMDSNKVVILDIRSPTMPVAELERHRGSVNAIAWAPQSCRHICSAGDDTQALIWDLPTVAGPNGIDPMSMYSAGAEINQLQWSAAQPDWISIAFSNKMQLLKV

SEQ ID NO: 24122 - protein, 489 aa, Tortula ruralis
MARTKKKAQRGKTIKKKKEDVEEVEMMEEDGSGPSQPQQQQGPTKVWQPGVDEMADDEELQFDPTAYHCLHSFKLGWPCLSFDIMRDDLGVLRRDFPHSLQCVAGTQADQAGNNAIAVVRMTNITGKIPKAPSATMDEDGQDSDSESSDDEDEEEVVPEQPGAPDQPVQSKKPIFKVRLVAHQGCVNRVRAMTQQSNIVATWADTGYVQVWDMAAHLRSMATSGPDAPGQPSTVRQAPLHIFTGHKDEGYALDWSPITAGRLLSGDCKSAIHLWEPTPAGKWVVEKAPYTGHTASVEDLQWSPTEADVFASCSVDQTLRIWDTRTRSGSAIAIKAHNADINVISWNRLVSCMLASGCDDGTFRIWDLRNFKEDSFVAHFKYHTLPITSIEWSPHEQSTLSVTSADHQLTIWDLSLERDPEEEAVYQAQLKQNQAEAPEDLPPQLLFVTTGQKDLKECHWHPQIQGMLMSTAGDGFNILRPSNLDNLPAL

SEQ ID NO: 24123 - protein, 337 aa, Petunia x hybrida
MENSSQESQHLRSENSVTYDSTYPIYSMAFSSFPTPRRRIAVGSFIEELNNRVELLSFNEETLTLNPIPNLSFDHPYPPTKLMFHPNPIKSNNDILASSGDYLRLWEVKESSIEPLFTLNNSKTSEYCAPLTSFDWNEVEPKRIGTSSIDTTCTIWDVEKGVVETQLIAHDKEVYDIAWGEAGVFASVSADGSVRIFDLRDKEHSTIIYESPTPDTPLLRLAWNKQDLRYMATILMDSNKVVILDIRSPAMPVAELERHQASVNAIAWAPQSCRHICSGGDDGQALIWELPTVAGPNGIDPMSMYSAGAEINQLQWSPAQRDWIAIAFSNKLQLLKV

SEQ ID NO: 24124 - protein, 299 aa, Dictyostelium discoideum
MWIPDKNSNRPDLLATTGDYLRLWEVGSNQRSIKLKSLLTNVIGGSSSSSSSSSSSSSSSSSSSSSSSSSSSSSSSSSSSSSSTDISSEFCAPLSSFDWNETDPSLLATSSIDTTCTIWNIETGQAKTQLIAHDKEVFDIAFARGTDLFASVGADGSLRMFDLRNLEHSTIIYETPSFVPLLRLCWNKQDPNYLATIQQDSPKVIILDIRVPSVPAAELVFHKSAVNGISWAPHSSCHICTVSDDKQALIWDLSSMPKPIEDPLLTYNALAEINQLSWSSSQPDWIAIAFSSHLQILKV

SEQ ID NO: 24125 - protein, 342 aa, Oryza sativa
  unsure (1)..(342): unsure at all Xaa locations
PSVAASAAEAQNPNAFTCELPHSIYALAFSXLRARXLAAGSFLEDLHNRVSLLSFDPVHPTAASFRALPALSFDHPYPPTKLQFHPRAASAXXHLLASSSDALRLWXLPRSTISPPSVLDNRKTSASEFCAPLTSFDWNEAEPRRIGTASIDTTCTIWDIERGVVETQLIAHDKAVHDIAWGENGIFASVSADGSVRVFDLRDKEHSTIFYESPRPDTPLLRLAWNRYDFHYMATLLMDSSAVVVLDMRAPGVPVAELHRHRACANAVAWAPQATRHLCSAGDDGQALIWELPATPGAVPAEGIDPVMVYDAGAEINQLQWAAAYPEWISIAFENKVQLLRV

SEQ ID NO: 24126 - protein, 342 aa, Oryza sativa; identical to SEQ ID NO: 24125
  unsure (1)..(342): unsure at all Xaa locations

SEQ ID NO: 24127 - protein, 339 aa, Oryza sativa
  unsure (1)..(339): unsure at all Xaa locations
GGRGGGGGEAKRSEIYTYEAGWHIYGMNWSVRRDKKYRLAIASLLEQHNNHVQVVQLDESSGDIAPVLTFDHPYPPTKTMFVPDPHSVRPDLLATSADHLRIWRIPSPDEAVELRXAALNGNRNSDYCGPLTSFDWNDADPRRIGTSSIDTTCTIWDVEREAVDTQLIAHDKEVYDIAWGGAGVFASVSADGSVRVFDLRDKEHSTIIYESAASPTPLVRLGWNKQDPRYMATIIMDSPKVVVLDIRYPTLPVVELHRHHSPVNAIAWAPHSSCHICTAGDDSQALIWDLSSMGTGTEGGLDPILAYTAGAEIEQLQWSATQPDWVAIAFSTKLQILRV

SEQ ID NO: 24128 - protein, 346 aa, Oryza sativa
  unsure (1)..(346): unsure at all Xaa locations
EQRNGGGRGGGGGEAKRSEIYTYEAGWHIYGMNWSVRRDKKYRLAIASLLEQHNNHVQVVQLDESSGDIAPVLTFDHPYPPTKTMFVPDPHSVRPDLLATSADHLRIWRIPSPDEAVELRCELNGNRNSDYCGPLTSFDWNDADPRRIGTSSIDTTCTIWDVEREAVDTQLIAHDKEVYDIAWGGAGVFASVSADGSVRVFDLRDKEHSTIIYESAASPTPLVRLGWNKQDPRYMAAVIMDSPEGLLRDCRLPSLPGAALHRPPFAPSTAFARAPVSSRPPCTAXGDDSLPLIWDXLSSMGTGTEVGLDPILAYTAGAEIEQLQWSATQPDWVAIAFSTKLQILRV

SEQ ID NO: 24129 - protein, 228 aa, Triticum aestivum
  unsure (1)..(228): unsure at all Xaa locations
MDQPKPTPSAAASPAGADAAPNPYAFTCELPHSIYALAFSXXSAPVLAAGSFLEDLHNRVSLLCFDSVHPTVRAVPSLSFDHPYPPTKLQFNPRAASTPLLASSSDALRLWHAPLDDLSASAPAPELRSVLDNRKASASDFCAPLTSFDWNEIEPRRIGTACIDTTCTVWDIERGVVETQLIAHDKAVHDIAWGEAGVFASVSADGSVRVFDLRDKEHSTIVYESPRX

SEQ ID NO: 24130 - protein, 138 aa, Triticum aestivum
  unsure (1)..(138): unsure at all Xaa locations
XEHSTIIYESSSGGAPLVRLGWNKQDPRYMATIIMDSPKVVVLDIRYPTLPVVELHRHHAPVNAMAWAPHSSCHICTAGDDSQALIWDLSSMGTGNKGGLDPILAYTAGAEVEQLQWSATQPDWVAIVFANKLQILRV

SEQ ID NO: 24131 - protein, 229 aa, Triticum aestivum
  unsure (1)..(229): unsure at all Xaa locations
ELQRRHGRRRRSRGCRWVGGSGPGERREPRQAKRSEIYTYEAGWHIYGMNWSVRRDKKYRLAIASLLEQLVNRVEVVQLDESTGDIAPVLSFDHPFPPTKSMFVPDPQGLRPDLLATSADLLRIWRITDDQPGVKLCCELNGHRNSDSAPPRLSRPGDAADPRRIGTSSIDATCTIWDVEREVVHTQLIAHDKEVYDIAWGGAGVFASVSADGSVRVFDLRDKEHSTIX

SEQ ID NO: 24132 - protein, 94 aa, Triticum aestivum
  unsure (1)..(94): unsure at all Xaa locations
VGVFASVSADGSVRVFDLRDKEHSTIVYESPRPDTPLLRLAWNRYDLRYMAALLMDSNAVVVLDIRAPGVPVAELHRXGGCVNAVAWAPQAARH

SEQ ID NO: 24133 - protein, 122 aa, Triticum aestivum
  unsure (1)..(122): unsure at all Xaa locations
XQPAPIVYGSSPPPAPRGRLGWNKQDPRYMATIIMDSPKVVVLDIRAPTXIWDLXXPWARGTIAEAMEMEMAMLLQLQXAEGGLDPILAYTAGAEVEQLQWSATQPDWVAIVFANKLQILRV

SEQ ID NO: 24134 - protein, 359 aa, Zea mays
MGGVGEGDAWADQEQGNGGGSRGVGGGGGEAKRSEIYTYEAAWHIYAMNWSVRRDKKYRLAIASLLEQVTNRVEVVQLDEASGDIAPVLTFDHQYPPTKTMFMPDPHALRPDLLATSADHLRIWRIPSSDDAEDLRSELNGNRNSDYCGPLTSFDWNDADPRRIGTSSIDTTCTIWDVEREAVDTQLIAHDKEVYDIAWGGAGVFASVSADGSVRVFDLRDKEHSTIIYESGSAPTPLVRLGWNKQDPRYMATIIMDSPKVVVLDIRYPTLPVVELHRHHAPVNAIAWAPHSSCHICTAGDDMQALIWDLSSMGTAAEGGLDPILAYTAGAEIEQLQWSATQPDWVAIAFANKLQILRV

SEQ ID NO: 24135 - protein, 327 aa, Zea mays
  unsure (1)..(327): unsure at all Xaa locations
MDPPKPPSSVASSSGPXXTPNPHAFTCELPHSIYALAFSPVAPVLASGSFLEDLHNRVSLLSFDPVRPSAASFRALPALSFDHPYPPTKLQFNPRAAAPSLLASSADTLRIWHISDTAPAPELRSVLDNRKASSEFCAPLTSFDWNEVEPRRIGTASIDTTCTVWDIDRGVVETQLIAHDKAVHDIAWGEAGVFASVSADGSVRVFDLRDKEHSTIVYESPRPDTPLLRLAWNRSDLRYMAALLMDSSAVVVLDIRAPGVPVAELHRHRACANAVAWAPQATRHLCSAGDDGQALIWELPETAAAVPAEGIDPVLVYDAGAEINQLX

SEQ ID NO: 24136 - protein, 143 aa, Zea mays
  unsure (1)..(143): unsure at all Xaa locations
DPPRIGTPSIDTTCTIWYVERESVDTQLMAHDKEVSDIAWGGAGVLPSVSADGSVRVFDFRDKEHSTIIYESGSAPTPLVRLGWIKQDPRYMATIIMDSPKVVVLDIRYPTLPVVELHRPHAPVNAIAWAPHLXCHXCQGTSP

SEQ ID NO: 24137 - protein, 143 aa, Zea mays; identical to SEQ ID NO: 24136
  unsure (1)..(143): unsure at all Xaa locations

SEQ ID NO: 24138 - protein, 333 aa, Perilla frutescens
MENSTQESHPRPENVVTYDSPYPIYAMAISAVNRRRVAVGSFVEELKNHVDILSFSEDSSSLKPVPSLSFDHPYPPTKLLFHPSVSAPSNLLASSGDFLRLWEVKDSSIVAVSTLNNSKTSEYSAPLTSFDWNEVEPRRIGTSSIDTTCTIWDIEKGAVETQLIAHDKEVYDIAWGEAGVFASVSADGSVRIFDLRDKEHSTIIYESPMPDTPLLRLAWNKQDLRYMATILMDSNKIVILDIRSPTMPVAELERHSASVNAIAWAPQSCKHICSAGDDGQSLLWELPTVAGPNGIDPMTMYSAGAEINQLQWSAAQPDWIAIAFANKMQMLKV

SEQ ID NO: 24139 - protein, 435 aa, Schizosaccharomyces pombe
MTDLRRNRYSISAGVGKSVLDSLGKFYGSPKRQLPNKFEAGKEYTGYNAPWIPFALDWLKQGKYSSEWIAMGSLNEEPNNMIQLLKLITGDDGNSHLEKAQAATDLEYPVTKLLWNPSSVGSNTDSQLLASTDQQLRLWKTDFEAGIDSPLLCQASLSTHVKTHNNAPLTSFDWCKTDPSYIVVSSLDTTCTVWDIVAQQSKTQLIAHDKEVYDVAFLKDSINVFVSVGADGSVRMFDLRSLDHSTIIYEGDSTFWKRNGDYTNASPPVSAPLLRLSACDSDVNLMATFHHNSSDVQMIDIRVPGTAYATLRGHKGDVNAVKWMPGSKSKLATCGDDCVVSLWDLDQPVNPSPAPTLSVSGTTPGMTGSTSEYVTPVSSVNSMRETASPLNADNQYSPLLSWKLEHEVNNLSWSVKNDGLAVVYGKSLEILKVPQ

SEQ ID NO: 24140 - protein, 523 aa, Saccharomyces cerevisiae
MDPFHNGNKRSSISFGSSQRQPYNKNNYLSGTNGPSSAAQDQGRGPSPFGMSGNTTNGGNSKRNSGCDLSATYYASRSPMYSPLDFSPPVFSPNHSQLQQARGYAANIPVVSNLMNPSMASVCEYQSHYPLFGLDWSADDYVCLGSYKEDSRNKLQVLHSNDLLSWESVVDADVVYPVSKIQWVPSQLYPRKLATCSDSLRIWSVSPEERQFQEQINLSLCKYNRQHPANPAAADDMKVIGTFPPITSFDWNTVDTNLIISSSIDTTCIVWDLQSSHYVKTQLIAHDSEVFDVRFLTKSTQLFASCGGDGSVRVFDLRSLAHSTIIYEPPSSSVSGATAGTITPSSKGSDALLRLEPSPYDPNVLATFAADSNKIIILDMRNPESPILNLQGHGSSVNGIKWHPTKRNVLLSCGDDCQVLYWDLNSSFMEINAAGSKSPSIHGTSLEDPDGDTEMTDGGAGSGLNEDPLSLNNNSKQVCKTLETPNMMYANKTQEINNIAWRPQRGDWFGCVSGKKFQNVRVL

SEQ ID NO: 24141 - protein, 592 aa, Neurospora crassa
MNQQSQQYQPARRPSAYASHGDELHMSAHQAHLSSPREYASSGAPHIKLEQMPSSPPNMQSYQSAGAVPNVLQPGGMSSRPPVMQSNTAPTLPTMQQSADYKSHGYERSSPATLASNSYDGGNSPYSAYNPTPPGGSSSSQYMSPASTNKYAAASSSRNVSNTPLGLSDIRPRADSTLSDGMLPGSQAYELANPQSRTSNYMAPWATYSFDWCKWRPSANSAGKLAIGSYLEDGHNYIQILEANLTQTPPDVYVPGTSKYSMDFTRTAEATHSYPVTRLLWEPPSSQKQSTDLLATSGDHLRLWSLPADPVVPTSGSSITSRSGRDAPITKLTPLALLSNSKTPDHTAPLTSLDWNTVQPSLIITSSIDTTCTIWDIPSLTAKTQLIAHDKEVYDVRFCANSVDVFVSCGQDGSVRMFDLRSLEHSTIIYEPTGKEERDANGGRISPTLAQQTMSHPPPLLRLATSPHDQHLLATFAMDSNVIRILDVRQPGQALLELRGHGGSLNCIEWSPTRRGTLASGGDDCQVLIWDLLNQPSGLTPAGQPDNVRSPVASWQCDYEVGNLGWVPPMGNGEYGDWLGVSAGRGVWGVRF

SEQ ID NO: 24142 - protein, 632 aa, Podospora anserina
MNQQQQYQQPSRRTDAYSSQHDELHLPSSSSMAHQGQHPLQQQQQQLPTRQYSSGPGVPPHIKLEQSPNPQQHHHQSAGVVPNVLQPGGLQTRPPVISSNTAPVLPTMQQQQPPDYQPHQTPTKSNSMNLSHNYPRSSPAAPYEGGSGYSAYAPNTPGGAGSSSQYMSPTDSKYSQSSGSQRIPSNAPLGLADIRPRADSSLSDGIPGTTSYEHANTQSRTSNYMAPWALYAFDWCKWAPQGNSAGKVAIGSYLEDGHNYIQILDAQVSPTPSDVYSPAGSRYTMDFTRIAEATHSYPVTRLLWEPPSSQKQSTDLLATSGDHLRLWSLPSDPQVQTPGSSITSRNGRDMPITKLTPLALLSNSKTPDHTAPLTSLDWNTVTPSLIITSSIDTTCTIWDIPSLTAKTQLIAHDKEVYDVRFCANSVDVFVSCGQDGSVRMFDLRSLEHSTIIYEPTGKEERDANGGRISPTLAQQTMSHPPPLLRLATSPHDQHLLATFAQDSNVIRILDVRQPGQALLELRGHGGALNCVEWSPLRRGTLASGGDDCQVLIWDLLNNNNTSNAATISTNGAAPPTGAQAAASTDNVRSPVAAWQCEYEVGNLGWVPHLAGGEYGDWLGVSAGRGVWGVKLG

SEQ ID NO: 24143 - protein, 478 aa, Caenorhabditis elegans
MIDQSQAAPSSSTSSSHLMHHHSNNYPSYTNPSASSSNHSNMGHPNASTGQTSAVQRMDPFNQIPSELYGSASSTSIAASTRQPSSQSQPSQQFRQMPADLGASTSTMHSVAPIDIYDNYGNASTSDLRRSSVRGDPRRKEIYAYNAPFTLFSHGWSAATDPSRKFRLAVSSFIEEYSNKIHIVQLDEEAGELVHRSTFDHPYPATKIMWIPDQKGTFPDLLATSGDYLRLWRIGTDNNACIESLLNTNRTAEYCAPLTSFDWNELDMNLIGTSSIDTTCTVWQLETGQAIGTTRPTAAIDGTVRTQLIAHDKEVFDISFSRGSAQIFASVGADGSLRLFDLRRLEHSTIMYEDPQRQPLLRLAWNRNDHNYIATFGQDSKEVLILDLRLPCTPVARLRNHEATINGLSWAPHSGSHICTAGDDYQALIWDVHEMPKPINDPILAYRAQAEVNQIHWSSSFPDWISICSDNKLEILRV

SEQ ID NO: 24144 - protein, 407 aa, Caenorhabditis elegans
MDPFNQIPSELYGSASSTSIAASTRQPSSQSQPSQQFRQMPADLGASTSTMHSVAPIDIYDNYGNASTSDLRRSSVRGDPRRKEIYAYNAPFTLFSHGWSAATDPSRKFRLAVSSFIEEYSNKIHIVQLDEEAATKIMWIPDQKGTFPDLLATSGDYLRLWRIGTDNNACIESLLNTNRTAEYCAPLTSFDWNELDMNLIGTSSIDTTCTVWQLETGQAIGTTRPTAAIDGTVRTQLIAHDKEVFDISFSRGSAQIFASVGADGSLRLFDLRRLEHSTIMYEDPQRQPLLRLAWNRNDHNYIATFGQDSKEVLILDLRLPCTPVARLRNHEATINGLSWAPHSGSHICTAGDDYQALIWDVHEMPKPINDPILAYRAQAEVNQIHWSSSFPDWISICSDNKLEILRV

SEQ ID NO: 24145 - protein, 388 aa, Caenorhabditis elegans
MATNGHAVNGEAHVMQQVAQQPAPPGPLAPQGIGRQNEIVIGGRDRRCEIYKFTSDQQLYASAWSNKNDIKFRLAVGTVSDVSVNPCAANKVSIVQLKDETGELVETASFPMEFPANAVGFIPDPDNVYPDLIATTSDCLRLWRVVDGKVHPDAVMINNTNSQYGSALTSFDWNELEPRYIGVSSVDTTCTIYDVEVGCAIGQTKPTAPFTLKTQLIAHDKPVHDIEFAKINGGRDHFATVGADGSARMFDLRHLNHSTIVYEDPNKEKLQRLSWNKQEPYFMALFAENSQEVQILDIRMPCNILCRLRNHTGPVNGIAWAPHSPHHICTAGDDSQALIWDLQQVPRPVDDPILAYSAGGEVNQIHWGPVHSNWIAICFNKTLEILRV

SEQ ID NO: 24146 - protein, 343 aa, Drosophila melanogaster
MSSTAGKRKEIYKYLAPWPLYSMNWSVRPDKRFRLALGSFIEEYNNKVQIISLDEDTSEFSAKSTFDHPYPTTKIMWIPDSKGVYPDLLATSGDYLRVWRAGEPDTRLECVLNNNKNSDFCAPLTSFDWNEVDPNLVGTSSIDTTCTIWGLETGQPHARVYVAGHVKTQLIAHDKEVYDIAFSRAGGGRDMFASVGADGSVRMFDLRHLEHSTIIYEDPAHTALLRLAWNKQDPNYLATVAMDSCEVIILDVRVPCTPVARLSNHRACVNGIAWAPHSSCHICTAGDDHQALIWDIQQMPRAIEDPILAYTAAEGEVNQIQWGATQPDWIAICYNKACEILRV

SEQ ID NO: 24147 - protein, 153 aa, Drosophila melanogaster
MFASVGADGSVRMFDLRHLEHSTIIYEDPAHTALLRLAWNKQDPNYLATVAMDSCEVIILDVRVPCTPVARLSNHRACVNGIAWAPHSSCHICTAGDDHQALIWDIQQMPRAIEDPILAYTAAEGEVNQIQWGATQPDWIAICYNKACEILRV

SEQ ID NO: 24148 - protein, 342 aa, Xenopus laevis
MSLHGKRKEIYKYEAPWTVYAMNWSVRPDKRFRLALGSFVEEYNNKVQLVGLDEESSEFICRNTFDHPYPTTKLMWIPDTKGVYPDLLATSGDYLRIWRVGETETRLECLLNNNKNSDFCAPLTSFDWNEVDPNLLGTSSIDTTCTIWGLETGQVLGRVNLVSGHVKTQLIAHDKEVYDIAFSRAGGGRDMFASVGADGSVRMFDLRHLEHSTIIYEDPQHHPLLRLCWNKQDPNYLATMAMDGMEVVILDVRVPCTPVARLNNHRACVNGIAWAPHSSCHICTAADDHQALIWDIQQMPRAIEDPILAYTAEGEINNVQWASTQPDWIAICYNNCLEILRV

SEQ ID NO: 24149 - protein, 342 aa, Homo sapiens
MSLHGKRKEIYKYEAPWTVYAMNWSVRPDKRFRLALGSFVEEYNNKVQLVGLDEESSEFICRNTFDHPYPTTKLMWIPDTKGVYPDLLATSGDYLRVWRVGETETRLECLLNNNKNSDFCAPLTSFDWNEVDPYLLGTSSIDTTCTIWGLETGQVLGRVNLVSGHVKTQLIAHDKEVYDIAFSRAGGGRDMFASVGADGSVRMFDLRHLEHSTIIYEDPQHHPLLRLCWNKQDPNYLATMAMDGMEVVILDVRVPCTPVARLNNHRACVNGIAWAPHSSCHICTAADDHQALIWDIQQMPRAIEDPILAYTAEGEINNVQWASTQPDWIAICYNNCLEILRV

SEQ ID NO: 24150 - DNA, 9215 bp, artificial
  Synthetic construct
actcaccagtcacagaaaagcatcttacggatggcatgacagtaagagaattatgcagtgctgccataaccatgagtgataacactgcggccaacttacttctgacaacgatcggaggaccgaaggagctaaccgcttttttgcacaacatgggggatcatgtaactcgccttgatcgttgggaaccggagctgaatgaagccataccaaacgacgagcgtgacaccacgatgcctgtagcaatggcaacaacgttgcgcaaactattaactggcgaactacttactctagcttcccggcaacaattaatagactggatggaggcggataaagttgcaggaccacttctgcgctcggcccttccggctggctggtttattgctgataaatctggagccggtgagcgtgggtctcgcggtatcattgcagcactggggccagatggtaagccctcccgtatcgtagttatctacacgacggggagtcaggcaactatggatgaacgaaatagacagatcgctgagataggtgcctcactgattaagcattggtaactgtcagaccaagtttactcatatatactttagattgatttaaaacttcatttttaatttaaaaggatctaggtgaagatcctttttgataatctcatgaccaaaatcccttaacgtgagttttcgttccactgagcgtcagaccccgtagaaaagatcaaaggatcttcttgagatcctttttttctgcgcgtaatctgctgcttgcaaacaaaaaaaccaccgctaccagcggtggtttgtttgccggatcaagagctaccaactctttttccgaaggtaactggcttcagcagagcgcagataccaaatactgtccttctagtgtagccgtagttaggccaccacttcaagaactctgtagcaccgcctacatacctcgctctgctaatcctgttaccagtggctgctgccagtggcgataagtcgtgtcttaccgggttggactcaagacgatagttaccggataaggcgcagcggtcgggctgaacggggggttcgtgcacacagcccagcttggagcgaacgacctacaccgaactgagatacctacagcgtgagctatgagaaagcgccacgcttcccgaagggagaaaggcggacaggtatccggtaagcggcagggtcggaacaggagagcgcacgagggagcttccagggggaaacgcctggtatctttatagtcctgtcgggtttcgccacctctgacttgagcgtcgatttttgtgatgctcgtcaggggggcggagcctatggaaaaacgccagcaacgcggcctttttacggttcctggccttttgctggccttttgctcacatgttctttcctgcgttatcccctgattctgtggataaccgtattaccgcctttgagtgagctgataccgctcgccgcagccgaacgaccgagcgcagcgagtcagtgagcgaggaagcggaagagcgcccaatacgcaaaccgcctctccccgcgcgttggccgattcattaatgcagctggcacgacaggtttcccgactggaaagcgggcagtgagcgcaacgcaattaatgtgagttagctcactcattaggcaccccaggctttacactttatgcttccggctcgtatgttgtgtggaattgtgagcggataacaatttcacacaggaaacagctatgaccatgattacgccaagctcgaaattaaccctcactaaagggaacaaaagctggagctgagtactggcgcgcctgcggccgcctcgaggtcattcatatgcttgagaagagagtcgggatagtccaaaataaaacaaaggtaagattacctggtcaaaagtgaaaacatcagttaaaaggtggtataaagtaaaatatcggtaataaaaggtggcccaaagtgaaatttactcttttctactattataaaaattgaggatgtttttgtcggtactttgatacgtcatttttgtatgaattggtttttaagtttattcgcttttggaaatgcatatctgtatttgagtcgggttttaagttcgtttgcttttgtaaatacagagggatttgtataagaaatatctttaaaaaaacccatatgctaatttgacataatttttgagaaaaatatatattcaggcgaattctcacaatgaacaataataagattaaaatagctttcccccgttgcagcgcatgggtattttttctagtaaaaataaaagataaacttagactcaaaacatttacaaaaacaacccctaaagttcctaaagcccaaagtgctatccacgatccattagcaaggcccagcccaacccaacccaacccaacccaccccagtccagccaactggacaatagtctccacccccggcactatcaccgtgagttgtccgcaccaccgcacgtctcgcagccaaaaaaaaaaaaagaaagaaaaaaaagaaaaagaaaaacagcaggtgggtccgggtcgtgggggccggaaaagcgaggaggatcgcgagcagcgacgaggcccggccctccctccgcttccaaagaaacgccccccatcgccactatatacatacccccccctctcctcccatccccccaaccctaccaccaccaccaccaccacctcctcccccctcgctgccggacgacgagctcctcccccctccccctccgccgccgccggtaaccaccccgcccctctcctctttctttctccgttttttttttcgtctcggtctcgatctttggccttggtagtttgggtgggcgagagcggcttcgtcgcccagatcggtgcgcgggaggggcgggatctcgcggctggcgtctccgggcgtgagtcggcccggatcctcgcggggaatggggctctcggatgtagatctgatccgccgttgttgggggagatgatggggggtttaaaatttccgccatgctaaacaagatcaggaagaggggaaaagggcactatggtttatatttttatatatttctgctgcttcgtcaggcttagatgtgctagatctttctttcttctttttgtgggtagaatttgaatccctcagcattgttcatcggtagtttttcttttcatgatttgtgacaaatgcagcctcgtgcggagcttttttgtaggtagaccgcgggatatcacaagtttgtacaaaaaagctgaacgagaaacgtaaaatgatataaatatcaatatattaaattagattttgcataaaaaacagactacataatactgtaaaacacaacatatccagtcactatggcggccgcattaggcaccccaggctttacactttatgcttccggctcgtataatgtgtggattttgagttaggatccgtcgagattttcaggagctaaggaagctaaaatggagaaaaaaatcactggatataccaccgttgatatatcccaatggcatcgtaaagaacattttgaggcatttcagtcagttgctcaatgtacctataaccagaccgttcagctggatattacggcctttttaaagaccgtaaagaaaaataagcacaagttttatccggcctttattcacattcttgcccgcctgatgaatgctcatccggaattccgtatggcaatgaaagacggtgagctggtgatatgggatagtgttcacccttgttacaccgttttccatgagcaaactgaaacgttttcatcgctctggagtgaataccacgacgatttccggcagtttctacacatatattcgcaagatgtggcgtgttacggtgaaaacctggcctatttccctaaagggtttattgagaatatgtttttcgtctcagccaatccctgggtgagtttcaccagttttgatttaaacgtggccaatatggacaacttcttcgcccccgttttcaccatgggcaaatattatacccaaggcgacaaggtgctgatgccgctggcgattcaggttcatcatgccgtctgtgatggcttccatgtcggcagaatgcttaatgaattacaacagtactgcgatgagtggcagggcggggcgtaaacgcgtggatccggcttactaaaagccagataacagtatgcgtatttgcgcgctgatttttgcggtataagaatatatactgatatgtatacccgaagtatgtcaaaaagaggtgtgctatgaagcagcgtattacagtgacagttgacagcgacagctatcagttgctcaaggcatatatgatgtcaatatctccggtctggtaagcacaaccatgcagaatgaagcccgtcgtctgcgtgccgaacgctggaaagcggaaaatcaggaagggatggctgaggtcgcccggtttattgaaatgaacggctcttttgctgacgagaacaggggctggtgaaatgcagtttaaggtttacacctataaaagagagagccgttatcgtctgtttgtggatgtacagagtgatattattgacacgcccgggcgacggatggtgatccccctggccagtgcacgtctgctgtcagataaagtctcccgtgaactttacccggtggtgcatatcggggatgaaagctggcgcatgatgaccaccgatatggccagtgtgccggtctccgttatcggggaagaagtggctgatctcagccaccgcgaaaatgacatcaaaaacgccattaacctgatgttctggggaatataaatgtcaggctcccttatacacagccagtctgcaggtcgaccatagtgactggatatgttgtgttttacagtattatgtagtctgttttttatgcaaaatctaatttaatatattgatatttatatcattttacgtttctcgttcagctttcttgtacaaagtggtgatggggatcccccaccctgcaatgtgaccctagacttgtccatcttcggatggccaacttaattaatgtataaataaaaggatgcacacatagtgacatgctaatcactataatgtgggcatcaaagttgtgtgttatgtgtaattactaattatctgaataagagaaagagatcatccatatttcttatcctaaatgaatgtcacgtgtctttataattctttgatgaaccagatgcattttattaaccaattccatatacatataaatattaatcatatataattaatatcaattgggttagcaaaacaaatctagtctaggtgtgttttgctaattattgggggatagtgcaaaaagaaatctacgttctcaataattcagatagaaaacttaataaagtgagataatttacatagattgcttttatcctttgatatatgtgaaaccatgcatgatataaggaaaatagatagagaaataattttttacatcgttgaatatgtaaacaatttaattcaagaagctaggaatataaatattgaggagtttatgattattattattattttgatgttcaatgaagttttttttaatttcatatgaagtatacaaaaattcttcatagatttttgtttctatgccgtagttatctttaatatatttgtggttgaagaaatttattgctagaaacgaatggattgtcaatttttttttaaagcaaatatatatgaaattatactgtatattattttagtcatgattaaaatgtggccttaattgaatcatctttctcattcattttttcaaaagcatatcaggatgattgatatttatctattttaaaaattaatttaagggttcaaattaaatttaacttaaaagtgtcctaaccgtagttaaaggtttactttaaaaaaatactatgaaaaatctaatcttctatgaatcgacctgcaggatttaaatccatcgttctggggcctaacgggccaagctttccgatcctacctgtcacttcatcaaaaggacagtagaaaaggaaggtggcacctacaaatgccatcattgcgataaaggaaaggctatcattcaagatgcctctgccgacagtggtcccaaagatggacccccacccacgaggagcatcgtggaaaaagaagacgttccaaccacgtcttcaaagcaagtggattgatgtgatacttccactgacgtaagggatgacgcacaatcccactatccttcgcaagacccttcctctatataaggaagttcatttcatttggagaggacacgctgaaatcaccagtctctctctacaagatcggggatctctagctagacgatcgtttcgcatgattgaacaagatggattgcacgcaggttctccggccgcttgggtggagaggctattcggctatgactgggcacaacagacaatcggctgctctgatgccgccgtgttccggctgtcagcgcaggggcgcccggttctttttgtcaagaccgacctgtccggtgccctgaatgaactgcaggacgaggcagcgcggctatcgtggctggccacgacgggcgttccttgcgcagctgtgctcgacgttgtcactgaagcgggaagggactggctgctattgggcgaagtgccggggcaggatctcctgtcatctcaccttgctcctgccgagaaagtatccatcatggctgatgcaatgcggcggctgcatacgcttgatccggctacctgcccattcgaccaccaagcgaaacatcgcatcgagcgagcacgtactcggatggaagccggtcttgtcgatcaggatgatctggacgaagagcatcaggggctcgcgccagccgaactgttcgccaggctcaaggcgcgcatgcccgacggcgaggatctcgtcgtgacccatggcgatgcctgcttgccgaatatcatggtggaaaatggccgcttttctggattcatcgactgtggccggctgggtgtggcggaccgctatcaggacatagcgttggctacccgtgatattgctgaagagcttggcggcgaatgggctgaccgcttcctcgtgctttacggtatcgccgctcccgattcgcagcgcatcgccttctatcgccttcttgacgagttcttctgagcgggactctggggttcgaagaattcccgatcgttcaaacatttggcaataaagtttcttaagattgaatcctgttgccggtcttgcgatgattatcatataatttctgttgaattacgttaagcatgtaataattaacatgtaatgcatgacgttatttatgagatgggtttttatgattagagtcccgcaattatacatttaatacgcgatagaaaacaaaatatagcgcgcaaactaggataaattatcgcgcgcggtgtcatctatgttactagatcggggatatcgcgtgtctttataattctttgatgaaccagatgcattttattaaccaattccatatacatataaatattaatcatatataattaatatcaattgggttagcaaaacaaatctagtctaggtgtgttttgctaattattgggggatagtgcaaaaagaaatctacgttctcaataattcagatagaaaacttaataaagtgagataatttacatagattgcttttatcctttgatatatgtgaaaccatgcatgatataaggaaaatagatagagaaataattttttacatcgttgaatatgtaaacaatttaattcaagaagctaggaatataaatattgaggagtttatgattattattattattttgatgttcaatgaagttttttttaatttcatatgaagtatacaaaaattcttcatagatttttgtttctatgccgtagttatctttaatatatttgtggttgaagaaatttattgctagaaacgaatggattgtcaatttttttttaaagcaaatatatatgaaattatactgtatattattttagtcatgattaaaatgtggccttaattgaatcatctttctcattcattttttcaaaagcatatcaggatgattgatatttatctattttaaaaattaatttaagggttcaaattaaatttaacttaaaagtgtcctaaccgtagttaaaggtttactttaaaaaaatactatgaaaaatctaatcttctatgaatcgaccgctgatcgatcgcggccgctggcgcgccagtactagctagtacccaattcgccctatagtgagtcgtattacaattcactggccgtcgttttacaacgtcgtgactgggaaaaccctggcgttacccaacttaatcgccttgcagcacatccccctttcgccagctggcgtaatagcgaagaggcccgcaccgatcgcccttcccaacagttgcgcagcctgaatggcgaatggaaattgtaagcgttaatattttgttaaaattcgcgttaaatttttgttaaatcagctcattttttaaccaataggccgaaatcggcaaaatcccttataaatcaaaagaatagaccgagatagggttgagtgttgttccagtttggaacaagagtccactattaaagaacgtggactccaacgtcaaagggcgaaaaaccgtctatcagggcgatggcccactacgtgaaccatcaccctaatcaagttttttggggtcgaggtgccgtaaagcactaaatcggaaccctaaagggagcccccgatttagagcttgacggggaaagccggcgaacgtggcgagaaaggaagggaagaaagcgaaaggagcgggcgctagggcgctggcaagtgtagcggtcacgctgcgcgtaaccaccacacccgccgcgcttaatgcgccgctacagggcgcgtcaggtggcacttttcggggaaatgtgcgcggaacccctatttgtttatttttctaaatacattcaaatatgtatccgctcatgagacaataaccctgataaatgcttcaataatattgaaaaaggaagagtatgagtattcaacatttccgtgtcgcccttattcccttttttgcggcattttgccttcctgtttttgctcacccagaaacgctggtgaaagtaaaagatgctgaagatcagttgggtgcacgagtgggttacatcgaactggatctcaacagcggtaagatccttgagagttttcgccccgaagaacgttttccaatgatgagcacttttaaagttctgctatgtggcgcggtattatcccgtattgacgccgggcaagagcaactcggtcgccgcatacactattctcagaatgacttggttgagt

SEQ ID NO: 24151 - DNA, 9769 bp, Artificial
  Synthetic construct
ggtccgatgtgagacttttcaacaaagggtaatatccggaaacctcctcggattccattgcccagctatctgtcactttattgtgaagatagtggaaaaggaaggtggctcctacaaatgccatcattgcgataaaggaaaggccatcgttgaagatgcctctgccgacagtggtcccaaagatggacccccacccacgaggagcatcgtggaaaaagaagacgttccaaccacgtcttcaaagcaagtggattgatgtgatggtccgattgagacttttcaacaaagggtaatatccggaaacctcctcggattccattgcccagctatctgtcactttattgtgaagatagtggaaaaggaaggtggctcctacaaatgccatcattgcgataaaggaaaggccatcgttgaagatgcctctgccgacagtggtcccaaagatggacccccacccacgaggagcatcgtggaaaaagaagacgttccaaccacgtcttcaaagcaagtggattgatgtgatatctccactgacgtaagggatgacgcacaatcccactatccttcgcaagacccttcctctatataaggaagttcatttcatttggagaggaccaggtggtaccggcgcgcctcagcagtcgctgtcgttaacccagcggtactcgctgaggcgatcgcgggccctgatcacctgtcgtacagtatttctacatttgatgtgtgatttgtgaagaacatcaaacaaaacaagcactggctttaatatgatgataagtattatggtaattaattaattggcaaaaacaacaatgaagctaaaattttatttattgagccttgcggttaatttcttgtgatgatctttttttttattttctaattatatatagtttcctttgctttgaaatgctaaaggtttgagagagttatgctctttttttcttcctctttcttttttaactttatcatacaaattttgaataaaaatgtgagtacattgagctcatttaaataagcttgatggggatcagattgtcgtttcccgccttcagtttaaactatcagtgtttgacaggatatattggcgggtaaacctaagagaaaagagcgtttattagaataatcggatatttaaaagggcgtgaaaaggtttatccgttcgtccatttgtatgtgcatgccaaccacagggttcccctcgggagtgcttggcattccgtgcgataatgacttctgttcaaccacccaaacgtcggaaagcctgacgacggagcagcattccaaaaagatcccttggctcgtctgggtcggctagaaggtcgagtgggctgctgtggcttgatccctcaacgcggtcgcggacgtagcgcagcgccgaaaaatcctcgatcggaggaccgaaggagctaaccgcttttttgcacaacatgggggatcatgtaactcgccttgatcgttgggaaccggagctgaatgaagccataccaaacgacgagcgtgacaccacgatgcctgcagcatctaacgcttgagttaagccgcgccgcgaagcggcgtcggcttgaacgaattgttagacattatttgccgactaccttggtgatctcgcctttcacgtagtgaacaaattcttccaactgatctgcgcgcgaggccaagcgatcttcttgtccaagataagcctgcctagcttcaagtatgacgggctgatactgggccggcaggcgctccattgcccagtcggcagcgacatccttcggcgcgattttgccggttactgcgctgtaccaaatgcgggacaacgtaagcactacatttcgctcatcgccagcccagtcgggcggcgagttccatagcgttaaggtttcatttagcgcctcaaatagatcctgttcaggaaccggatcaaagagttcctccgccgctggacctaccaaggcaacgctatgttctcttgcttttgtcagcaagatagccagatcaatgtcgatcgtggctggctcgaagatacctgcaagaatgtcattgcgctgccattctccaaattgcagttcgcgcttagctggataacgccacggaatgatgtcgtcgtgcacaacaatggtgacttctacagcgcggagaatctcgctctctccaggggaagccgaagtttccaaaaggtcgttgatcaaagctcgccgcgttgtttcatcaagccttacggtcaccgtaaccagcaaatcaatatcactgtgtggcttcaggccgccatccactgcggagccgtacaaatgtacggccagcaacgtcggttcgagatggcgctcgatgacgccaactacctctgatagttgagtcgatacttcggcgatcaccgcttccctcatgatgtttaactcctgaattaagccgcgccgcgaagcggtgtcggcttgaatgaattgttaggcgtcatcctgtgctcccgacctgcagcaatggcaacaacgttgcgcaaactattaactggcgaactacttactctagcttcccggcaacaattaatagactggatggaggcggataaagttgcaggaccacttctgcgctcggcccttccggctggctggtttattgctgataaatctggagccggtgagcgtgggtctcgcggtatcattgcagcactggggccagatggtaagccctcccgtatcgtagttatctacacgacggggagtcaggcaactatggatgaacgaaatagacagatcgctgagataggtgcctcactgattaagcattggtaactgtcagaccaagtttactcatatatactttagattgatttaaaacttcatttttaatttaaaaggatctaggtgaagatcctttttgataatctcatgaccaaaatcccttaacgtgagttttcgttccactgagcgtcagaccccgtagaaaagatcaaaggatcttcttgagatcctttttttctgcgcgtaatctgctgcttgcaaacaaaaaaaccaccgctaccagcggtggtttgtttgccggatcaagagctaccaactctttttccgaaggtaactggcttcagcagagcgcagataccaaatactgtccttctagtgtagccgtagttaggccaccacttcaagaactctgtagcaccgcctacatacctcgctctgctaatcctgttaccagtggctgctgccagtggcgataagtcgtgtcttaccgggttggactcaagacgatagttaccggataaggcgcagcggtcgggctgaacggggggttcgtgcacacagcccagcttggagcgaacgacctacaccgaactgagatacctacagcgtgagctatgagaaagcgccacgcttcccgaagggagaaaggcggacaggtatccggtaagcggcagggtcggaacaggagagcgcacgagggagcttccagggggaaacgcctggtatctttatagtcctgtcgggtttcgccacctctgacttgagcgtcgatttttgtgatgctcgtcaggggggcggagcctatggaaaaacgccagcaacgcggcctttttacggttcctggccttttgctggccttttgctcacatgttctttcctgcgttatcccctgattctgtggataaccgtattaccgcctttgagtgagctgataccgctcgccgcagccgaacgaccgagcgcagcgagtcagtgagcgaggaagcggaagagcgcctgatgcggtattttctccttacgcatctgtgcggtatttcacaccgcatatggtgcactctcagtacaatctgctctgatgccgcatagttaagccagtatacactccgctatcgctacgtgactgggtcatggctgcgccccgacacccgccaacacccgctgacgcgccctgacgggcttgtctgctcccggcatccgcttacagacaagctgtgaccgtctccgggagctgcatgtgtcagaggttttcaccgtcatcaccgaaacgcgcgaggcagctgcggtaaagctcatcagcgtggtcgtgaagcgattcacagatgtctgcctgttcatccgcgtccagctcgttgagtttctccagaagcgttaatgtctggcttctgataaagcgggccatgttaagggcggttttttcctgtttggtcactgatgcctccgtgtaagggggatttctgttcatgggggtaatgataccgatgaaacgagagaggatgctcacgatacgggttactgatgatgaacatgcccggttactggaacgttgtgagggtaaacaactggcggtatggatgcggcgggaccagagaaaaatcactcagggtcaatgccagcgcttcgttaatacagatgtaggtgttccacagggtagccagcagcatcctgcgatgcagatccggaacataatggtgcagggcgctgacttccgcgtttccagactttacgaaacacggaaaccgaagaccattcatgttgttgctcaggtcgcagacgttttgcagcagcagtcgcttcacgttcgctcgcgtatcggtgattcattctgctaaccagtaaggcaaccccgccagcctagccgggtcctcaacgacaggagcacgatcatgcgcacccgtggccaggacccaacgctgcccgagatgcgccgcgtgcggctgctggagatggcggacgcgatggatatgttctgccaagggttggtttgcgcattcacagttctccgcaagaattgattggctccaattcttggagtggtgaatccgttagcgaggtgccgccggcttccattcaggtcgaggtggcccggctccatgcaccgcgacgcaacgcggggaggcagacaaggtatagggcggcgcctacaatccatgccaacccgttccatgtgctcgccgaggcggcataaatcgccgtgacgatcagcggtccaatgatcgaagttaggctggtaagagccgcgagcgatccttgaagctgtccctgatggtcgtcatctacctgcctggacagcatggcctgcaacgcgggcatcccgatgccgccggaagcgagaagaatcataatggggaaggccatccagcctcgcgtcgcgaacgccagcaagacgtagcccagcgcgtcggccgccatgccggcgataatggcctgcttctcgccgaaacgtttggtggcgggaccagtgacgaaggcttgagcgagggcgtgcaagattccgaataccgcaagcgacaggccgatcatcgtcgcgctccagcgaaagcggtcctcgccgaaaatgacccagagcgctgccggcacctgtcctacgagttgcatgataaagaagacagtcataagtgcggcgacgatagtcatgccccgcgcccaccggaaggagctgactgggttgaaggctctcaagggcatcggtcgatcgaccctttccgacgctcaccgggctggttgccctcgccgctgggctggcggccgtctatggccctgcaaacgcgccagaaacgccgtcgaagccgtgtgcgagacaccgcggccggccgccggcgttgtggatacctcgcggaaaacttggccctcactgacagatgaggggcggacgttgacacttgaggggccgactcacccggcgcggcgttgacagatgaggggcaggctcgatttcggccggcgacgtggagctggccagcctcgcaaatcggcgaaaacgcctgattttacgcgagtttcccacagatgatgtggacaagcctggggataagtgccctgcggtattgacacttgaggggcgcgactactgacagatgaggggcgcgatccttgacacttgaggggcagagtgctgacagatgaggggcgcacctattgacatttgaggggctgtccacaggcagaaaatccagcatttgcaagggtttccgcccgtttttcggccaccgctaacctgtcttttaacctgcttttaaaccaatatttataaaccttgtttttaaccagggctgcgccctgtgcgcgtgaccgcgcacgccgaaggggggtgcccccccttctcgaaccctcccggcccgctaacgcgggcctcccatccccccaggggctgcgcccctcggccgcgaacggcctcaccccaaaaatggcagccaagctaggaaaagtcccatgtggatcactccgttgccccgtcgctcaccgtgttggggggaaggtgcacatggctcagttctcaatggaaattatctgcctaaccggctcagttctgcgtagaaaccaacatgcaagctccaccgggtgcaaagcggcagcggcggcaggatatattcaattgtaaatggcttcatgtccgggaaatctacatggatcagcaatgagtatgatggtcaatatggagaaaaagaaagagtaattaccaattttttttcaattcaaaaatgtagatgtccgcagcgttattataaaatgaaagtacattttgataaaacgacaaattacgatccgtcgtatttataggcgaaagcaataaacaaattattctaattcggaaatctttatttcgacgtgtctacattcacgtccaaatgggggcttagatgagaaacttcacgatcgatgcggccaccactcgagaagcttactagtcaacaattggccaatctttgttctaaattgctaataaacgaccatttccgtcaattctccttggttgcaacagtctacccgtcaaatgtttactaatttataagtgtgaagtttgaattatgaaagacgaaatcgtattaaaaattcacaagaataaacaactccatagattttcaaaaaaacagtcacgagaaaaaaaccacagtccgtttgtctgctcttctagtttttattatttttctattaatagttttttgttatttcgagaataaaatttgaacgatgtccgaaccacaaaagccgagccgataaatcctaagccgagcctaactttagccgtaaccatcagtcacggctcccgggctaattcatttgaaccgaatcataatcaacggtttagatcaaactcaaaacaatctaacggcaacatagacgcgtcggtgagctaaaaagagtgtgaaagccaggtcaccatagcattgtctctcccagattttttatttgggaaataatagaagaaatagaaaaaaataaaagagtgagaaaaatcgtagagctatatattcgcacatgtactcgtttcgctttccttagtgttagctgctgccgctgttgtttctcctccatttctctatctttctctctcgctgcttctcgaatcttctgtatcatcttcttcttcttcaaggtgagtctctagatccgttcgcttgattttgctgctcgttagtcgttattgttgattctctatgccgatttcgctagatctgtttagcatgcgttgtggttttatgagaaaatctttgttttgggggttgcttgttatgtgattcgatccgtgcttgttggatcgatctgagttaattcttaaggtttatgtgttagatctatggagtttgaggattcttctcgcttctgtcgatctctcgctgttatttttgtttttttcagtgaagtgaagttgtttagttcgaaatgacttcgtgtatgctcgattgatctggttttaatcttcgatctgttaggtgttgatgtttacaagtgaattctagtgttttctcgttgagatctgtgaagtttgaacctagttttctcaataatcaacatatgaagcgatgtttgagtttcaataaacgctgctaatcttcgaaactaagttgtgatctgattcgtgtttacttcatgagcttatccaattcatttcggtttcattttactttttttttagtgaaccatggcgcaagttagcagaatctgcaatggtgtgcagaacccatctcttatctccaatctctcgaaatccagtcaacgcaaatctcccttatcggtttctctgaagacgcagcagcatccacgagcttatccgatttcgtcgtcgtggggattgaagaagagtgggatgacgttaattggctctgagcttcgtcctcttaaggtcatgtcttctgtttccacggcgtgcatgcttcatggagcttcatctaggccagctactgccaggaagtctagcgggctcagtggcaccgtgcgcatccctggcgataaaagtatttcacacaggagcttcatgttcggaggacttgctagtggagagacgagaatcactggtttgcttgagggcgaagatgttatcaacaccggtaaggcgatgcaagcaatgggtgccagaatccgaaaagagggcgatacgtggatcatcgacggtgttggtaacggaggattgctcgctcccgaagcgccacttgactttgggaacgcagctacggggtgccgtcttactatgggactggtaggcgtgtatgactttgactctaccttcatcggtgacgcgagcctcactaagagaccaatgggacgagtgctgaatcccctgagggagatgggtgtccaggtgaaatctgaggatggtgatcgtcttccggttactctgcgaggccccaagacccccacgccaatcacgtacagggttccgatggcgtcagcacaggtcaagtcagcggtactcctggcgggcctcaacacacctggaatcacaaccgtgattgaacccatcatgactagagaccacacggagaagatgttgcagggtttcggcgctaatctaacggtcgaaaccgacgccgacggcgtgaggacaatccgcttggagggcagaggtaaactgactggccaagtcatcgatgtgcctggagatccctcgtccacagcgtttcccctcgtagctgcgttgctcgtccctggatctgatgtgacgatcctgaatgtcctcatgaatccaactagaaccggcctcatcctcacattgcaggagatgggtgctgacatcgaggttatcaatcctaggttggcaggtggagaggatgtggccgatctgcgcgtgcgttctagtacactcaaaggcgtgaccgtccctgaggatcgcgctccatccatgatcgacgagtaccccattctcgccgttgctgctgcgtttgccgagggcgcaactgtaatgaacggccttgaggagttgagggttaaggagagtgacaggctgtccgcggtggcgaatggcctgaagctaaacggcgtggactgcgacgaaggtgaaacgtcccttgtagtccgtggtcgcccagacgggaaggggttggggaatgcttcgggagctgctgtggcgacgcaccttgatcatagaatcgccatgtcatttctggtgatgggacttgtctccgagaatccggtgaccgttgacgatgctaccatgatcgccacctcctttcctgagttcatggacctcatggcaggcttgggggccaagatcgagctgtctgatactaaggccgcttgaattcccgatcgttcaaacatttggcaataaagtttcttaagattgaatcctgttgccggtcttgcgatgattatcatataatttctgttgaattacgttaagcatgtaataattaacatgtaatgcatgacgttatttatgagatgggtttttatgattagagtcccgcaattatacatttaatacgcgatagaaaacaaaatatagcgcgcaaactaggataaattatcgcgcgcggtgtcatctatgttactagatcggggatcccacgtgcggaccgcctgcaggccgcgttatcaagctaactgca

SEQ ID NO: 24152 - DNA, 8504 bp, artificial
  Synthetic construct
gtaccctcagcagtcgctgtgcgatcgccagcggtactcgctgaggtcgacgtagttagttaattcagctttcgttcgtatcatcggtttcgacaacgttcgtcaagttcaatgcatcagtttcattgcgcacacaccagaatcctactgagtttgagtattatggcattgggaaaactgtttttcttgtaccatttgttgtgcttgtaatttactgtgttttttattcggttttcgctatcgaactgtgaaatggaaatggatggagaagagttaatgaatgatatggtccttttgttcattctcaaattaatattatttgttttttctcttatttgttgtgtgttgaatttgaaattataagagatatgcaaacattttgttttgagtaaaaatgtgtcaaatcgtggcctctaatgaccgaagttaatatgaggagtaaaacacttgtagttgtaccattatgcttattcactaggcaacaaatatattttcagacctagaaaagctgcaaatgttactgaatacaagtatgtcctcttgtgttttagacatttatgaactttcctttatgtaattttccagaatccttgtcagattctaatcattgctttataattatagttatactcatggatttgtagttgagtatgaaaatattttttaatgcattttatgacttgccaattgattgacaacgcggccgccactcgagtggaagctagctttccgatcctacctgtcacttcatcaaaaggacagtagaaaaggaaggtggcacctacaaatgccatcattgcgataaaggaaaggctatcattcaagatgcctctgccgacagtggtcccaaagatggacccccacccacgaggagcatcgtggaaaaagaagacgttccaaccacgtcttcaaagcaagtggattgatgtgatacttccactgacgtaagggatgacgcacaatcccactatccttcgcaagacccttcctctatataaggaagttcatttcatttggagaggacacgctgaaatcaccagtctctctctacaagatcggggatctctagctagacgatcgtttcgcatgattgaacaagatggattgcacgcaggttctccggccgcttgggtggagaggctattcggctatgactgggcacaacagacaatcggctgctctgatgccgccgtgttccggctgtcagcgcaggggcgcccggttctttttgtcaagaccgacctgtccggtgccctgaatgaactgcaggacgaggcagcgcggctatcgtggctggccacgacgggcgttccttgcgcagctgtgctcgacgttgtcactgaagcgggaagggactggctgctattgggcgaagtgccggggcaggatctcctgtcatctcaccttgctcctgccgagaaagtatccatcatggctgatgcaatgcggcggctgcatacgcttgatccggctacctgcccattcgaccaccaagcgaaacatcgcatcgagcgagcacgtactcggatggaagccggtcttgtcgatcaggatgatctggacgaagagcatcaggggctcgcgccagccgaactgttcgccaggctcaaggcgcgcatgcccgacggcgaggatctcgtcgtgacccatggcgatgcctgcttgccgaatatcatggtggaaaatggccgcttttctggattcatcgactgtggccggctgggtgtggcggaccgctatcaggacatagcgttggctacccgtgatattgctgaagagcttggcggcgaatgggctgaccgcttcctcgtgctttacggtatcgccgctcccgattcgcagcgcatcgccttctatcgccttcttgacgagttcttctgagcgggactctggggttcgatccccaattcccgatcgttcaaacatttggcaataaagtttcttaagattgaatcctgttgccggtcttgcgatgattatcatataatttctgttgaattacgttaagcatgtaataattaacatgtaatgcatgacgttatttatgagatgggtttttatgattagagtcccgcaattatacatttaatacgcgatagaaaacaaaatatagcgcgcaaactaggataaattatcgcgcgcggtgtcatctatgttactagatcggggatcgggccactcgagtggtggccgcatcgatcgtgaagtttctcatctaagcccccatttggacgtgaatgtagacacgtcgaaataaagatttccgaattagaataatttgtttattgctttcgcctataaatacgacggatcgtaatttgtcgttttatcaaaatgtactttcattttataataacgctgcggacatctacatttttgaattgaaaaaaaattggtaattactctttctttttctccatattgaccatcatactcattgctgatccatgtagatttcccggacatgaagccatttacaattgaatatatcctgccgccgctgccgctttgcacccggtggagcttgcatgttggtttctacgcagaactgagccggttaggcagataatttccattgagaactgagccatgtgcaccttccccccaacacggtgagcgacggggcaacggagtgatccacatgggacttttcctagcttggctgccatttttggggtgaggccgttcgcggccgaggggcgcagcccctggggggatgggaggcccgcgttagcgggccgggagggttcgagaagggggggcaccccccttcggcgtgcgcggtcacgcgcacagggcgcagccctggttaaaaacaaggtttataaatattggtttaaaagcaggttaaaagacaggttagcggtggccgaaaaacgggcggaaacccttgcaaatgctggattttctgcctgtggacagcccctcaaatgtcaataggtgcgcccctcatctgtcagcactctgcccctcaagtgtcaaggatcgcgcccctcatctgtcagtagtcgcgcccctcaagtgtcaataccgcagggcacttatccccaggcttgtccacatcatctgtgggaaactcgcgtaaaatcaggcgttttcgccgatttgcgaggctggccagctccacgtcgccggccgaaatcgagcctgcccctcatctgtcaacgccgcgccgggtgagtcggcccctcaagtgtcaacgtccgcccctcatctgtcagtgagggccaagttttccgcgaggtatccacaacgccggcggccggccgcggtgtctcgcacacggcttcgacggcgtttctggcgcgtttgcagggccatagacggccgccagcccagcggcgagggcaaccagcccggtgagcgtcggaaagggtcgatcgaccgatgcccttgagagccttcaacccagtcagctccttccggtgggcgcggggcatgactatcgtcgccgcacttatgactgtcttctttatcatgcaactcgtaggacaggtgccggcagcgctctgggtcattttcggcgaggaccgctttcgctggagcgcgacgatgatcggcctgtcgcttgcggtattcggaatcttgcacgccctcgctcaagccttcgtcactggtcccgccaccaaacgtttcggcgagaagcaggccattatcgccggcatggcggccgacgcgctgggctacgtcttgctggcgttcgcgacgcgaggctggatggccttccccattatgattcttctcgcttccggcggcatcgggatgcccgcgttgcaggccatgctgtccaggcaggtagatgacgaccatcagggacagcttcaaggatcgctcgcggctcttaccagcctaacttcgatcattggaccgctgatcgtcacggcgatttatgccgcctcggcgagcacatggaacgggttggcatggattgtaggcgccgccctataccttgtctgcctccccgcgttgcgtcgcggtgcatggagccgggccacctcgacctgaatggaagccggcggcacctcgctaacggattcaccactccaagaattggagccaatcaattcttgcggagaactgtgaatgcgcaaaccaacccttggcagaacatatccatcgcgtccgccatctccagcagccgcacgcggcgcatctcgggcagcgttgggtcctggccacgggtgcgcatgatcgtgctcctgtcgttgaggacccggctaggctggcggggttgccttactggttagcagaatgaatcaccgatacgcgagcgaacgtgaagcgactgctgctgcaaaacgtctgcgacctgagcaacaacatgaatggtcttcggtttccgtgtttcgtaaagtctggaaacgcggaagtcagcgccctgcaccattatgttccggatctgcatcgcaggatgctgctggctaccctgtggaacacctacatctgtattaacgaagcgctggcattgaccctgagtgatttttctctggtcccgccgcatccataccgccagttgtttaccctcacaacgttccagtaaccgggcatgttcatcatcagtaacccgtatcgtgagcatcctctctcgtttcatcggtatcattacccccatgaacagaaatcccccttacacggaggcatcagtgaccaaacaggaaaaaaccgcccttaacatggcccgctttatcagaagccagacattaacgcttctggagaaactcaacgagctggacgcggatgaacaggcagacatctgtgaatcgcttcacgaccacgctgatgagctttaccgcagctgcctcgcgcgtttcggtgatgacggtgaaaacctctgacacatgcagctcccggagacggtcacagcttgtctgtaagcggatgccgggagcagacaagcccgtcagggcgcgtcagcgggtgttggcgggtgtcggggcgcagccatgacccagtcacgtagcgatagcggagtgtatactggcttaactatgcggcatcagagcagattgtactgagagtgcaccatatgcggtgtgaaataccgcacagatgcgtaaggagaaaataccgcatcaggcgctcttccgcttcctcgctcactgactcgctgcgctcggtcgttcggctgcggcgagcggtatcagctcactcaaaggcggtaatacggttatccacagaatcaggggataacgcaggaaagaacatgtgagcaaaaggccagcaaaaggccaggaaccgtaaaaaggccgcgttgctggcgtttttccataggctccgcccccctgacgagcatcacaaaaatcgacgctcaagtcagaggtggcgaaacccgacaggactataaagataccaggcgtttccccctggaagctccctcgtgcgctctcctgttccgaccctgccgcttaccggatacctgtccgcctttctcccttcgggaagcgtggcgctttctcatagctcacgctgtaggtatctcagttcggtgtaggtcgttcgctccaagctgggctgtgtgcacgaaccccccgttcagcccgaccgctgcgccttatccggtaactatcgtcttgagtccaacccggtaagacacgacttatcgccactggcagcagccactggtaacaggattagcagagcgaggtatgtaggcggtgctacagagttcttgaagtggtggcctaactacggctacactagaaggacagtatttggtatctgcgctctgctgaagccagttaccttcggaaaaagagttggtagctcttgatccggcaaacaaaccaccgctggtagcggtggtttttttgtttgcaagcagcagattacgcgcagaaaaaaaggatctcaagaagatcctttgatcttttctacggggtctgacgctcagtggaacgaaaactcacgttaagggattttggtcatgagattatcaaaaaggatcttcacctagatccttttaaattaaaaatgaagttttaaatcaatctaaagtatatatgagtaaacttggtctgacagttaccaatgcttaatcagtgaggcacctatctcagcgatctgtctatttcgttcatccatagttgcctgactccccgtcgtgtagataactacgatacgggagggcttaccatctggccccagtgctgcaatgataccgcgagacccacgctcaccggctccagatttatcagcaataaaccagccagccggaagggccgagcgcagaagtggtcctgcaactttatccgcctccatccagtctattaattgttgccgggaagctagagtaagtagttcgccagttaatagtttgcgcaacgttgttgccattgctgcaggtcgggagcacaggatgacgcctaacaattcattcaagccgacaccgcttcgcggcgcggcttaattcaggagttaaacatcatgagggaagcggtgatcgccgaagtatcgactcaactatcagaggtagttggcgtcatcgagcgccatctcgaaccgacgttgctggccgtacatttgtacggctccgcagtggatggcggcctgaagccacacagtgatattgatttgctggttacggtgaccgtaaggcttgatgaaacaacgcggcgagctttgatcaacgaccttttggaaacttcggcttcccctggagagagcgagattctccgcgctgtagaagtcaccattgttgtgcacgacgacatcattccgtggcgttatccagctaagcgcgaactgcaatttggagaatggcagcgcaatgacattcttgcaggtatcttcgagccagccacgatcgacattgatctggctatcttgctgacaaaagcaagagaacatagcgttgccttggtaggtccagcggcggaggaactctttgatccggttcctgaacaggatctatttgaggcgctaaatgaaaccttaacgctatggaactcgccgcccgactgggctggcgatgagcgaaatgtagtgcttacgttgtcccgcatttggtacagcgcagtaaccggcaaaatcgcgccgaaggatgtcgctgccgactgggcaatggagcgcctgccggcccagtatcagcccgtcatacttgaagctaggcaggcttatcttggacaagaagatcgcttggcctcgcgcgcagatcagttggaagaatttgttcactacgtgaaaggcgagatcaccaaggtagtcggcaaataatgtctaacaattcgttcaagccgacgccgcttcgcggcgcggcttaactcaagcgttagatgctgcaggcatcgtggtgtcacgctcgtcgtttggtatggcttcattcagctccggttcccaacgatcaaggcgagttacatgatcccccatgttgtgcaaaaaagcggttagctccttcggtcctccgatcgaggatttttcggcgctgcgctacgtccgcgaccgcgttgagggatcaagccacagcagcccactcgaccttctagccgacccagacgagccaagggatctttttggaatgctgctccgtcgtcaggctttccgacgtttgggtggttgaacagaagtcattatcgcacggaatgccaagcactcccgaggggaaccctgtggttggcatgcacatacaaatggacgaacggataaaccttttcacgcccttttaaatatccgattattctaataaacgctcttttctcttaggtttacccgccaatatatcctgtcaaacactgatagtttaaactgaaggcgggaaacgacaatctgatccccatcaagcttggccagcttctgcaggtccgattgagacttttcaacaaagggtaatatccggaaacctcctcggattccattgcccagctatctgtcactttattgtgaagatagtggaaaaggaaggtggctcctacaaatgccatcattgcgataaaggaaaggccatcgttgaagatgcctctgccgacagtggtcccaaagatggacccccacccacgaggagcatcgtggaaaaagaagacgttccaaccacgtcttcaaagcaagtggattgatgtgatggtccgattgagacttttcaacaaagggtaatatccggaaacctcctcggattccattgcccagctatctgtcactttattgtgaagatagtggaaaaggaaggtggctcctacaaatgccatcattgcgataaaggaaaggccatcgttgaagatgcctctgccgacagtggtcccaaagatggacccccacccacgaggagcatcgtggaaaaagaagacgttccaaccacgtcttcaaagcaagtggattgatgtgatatctccactgacgtaagggatgacgcacaatcccactatccttcgcaagacccttcctctatataaggaagttcatttcatttggagaggacacagaaaaatttgctacattgtttcacaaacttcaaatattattcatttatttgtcagctttcaaactctttgtttcttgtttgttgattagatctg

SEQ ID NO: 24153 - protein, 613 aa, artificial
  consensus sequence
  misc_feature (1)..(145): Xaa can be any naturally occurring amino acid
  misc_feature (147)..(147): Xaa can be any naturally occurring amino acid
  misc_feature (149)..(154): Xaa can be any naturally occurring amino acid
  misc_feature (156)..(156): Xaa can be any naturally occurring amino acid
  misc_feature (160)..(160): Xaa can be any naturally occurring amino acid
  misc_feature (167)..(170): Xaa can be any naturally occurring amino acid
  misc_feature (172)..(173): Xaa can be any naturally occurring amino acid
  misc_feature (176)..(206): Xaa can be any naturally occurring amino acid
  misc_feature (208)..(208): Xaa can be any naturally occurring amino acid
  misc_feature (210)..(210): Xaa can be any naturally occurring amino acid
  misc_feature (213)..(213): Xaa can be any naturally occurring amino acid
  misc_feature (215)..(217): Xaa can be any naturally occurring amino acid
  misc_feature (219)..(219): Xaa can be any naturally occurring amino acid
  misc_feature (240)..(240): Xaa can be any naturally occurring amino acid
  misc_feature (249)..(249): Xaa can be any naturally occurring amino acid
  misc_feature (259)..(259): Xaa can be any naturally occurring amino acid
  misc_feature (264)..(264): Xaa can be any naturally occurring amino acid
  misc_feature (268)..(276): Xaa can be any naturally occurring amino acid
  misc_feature (278)..(374): Xaa can be any naturally occurring amino acid
  misc_feature (377)..(434): Xaa can be any naturally occurring amino acid
  misc_feature (436)..(442): Xaa can be any naturally occurring amino acid
  misc_feature (444)..(459): Xaa can be any naturally occurring amino acid
  misc_feature (461)..(492): Xaa can be any naturally occurring amino acid
  misc_feature (494)..(503): Xaa can be any naturally occurring amino acid
  misc_feature (510)..(515): Xaa can be any naturally occurring amino acid
  misc_feature (517)..(522): Xaa can be any naturally occurring amino acid
  misc_feature (526)..(526): Xaa can be any naturally occurring amino acid
  misc_feature (531)..(540): Xaa can be any naturally occurring amino acid
  misc_feature (542)..(543): Xaa can be any naturally occurring amino acid
  misc_feature (546)..(613): Xaa can be any naturally occurring amino acid
XXXXXXXXXXXXXXXXXXXXXXXXXXXXXXXXXXXXXXXXXXXXXXXXXXXXXXXXXXXXXXXXXXXXXXXXXXXXXXXXXXXXXXXXXXXXXXXXXXXXXXXXXXXXXXXXXXXXXXXXXXXXXXXXXXXXXXXXXXXXXXXXXVXGXXXXXXWXELEXQALIYKXXXXNXXVPXXXXXXXXXXXXXXXXXXXXXXXXXXXXXXXGXFXLGXSXXXDXEPGRCRRTDGKKWRCSRDAVXDQKYCERHXNRGRHRSRKXVEGQXGHAXXXXXXXXXAXXXXXXXXXXXXXXXXXXXXXXXXXXXXXXXXXXXXXXXXXXXXXXXXXXXXXXXXXXXXXXXXXXXXXXXXXXXXXXXXXXXXXXXXXXXXXXXXXSLXXXXXXXXXXXXXXXXXXXXXXXXXXXXXXXXXXXXXXXXXXXXXXXXXXXXXXXXXXSXXXXXXXSXXXXXXXXXXXXXXXXLXXXXXXXXXXXXXXXXXXXXXXXXXXXXXXXXWXXXXXXXXXXGGPLGEXXXXXXNXXXXXXSSPXGVLQXXXXXXXXXXSXXSSXXXXXXXXXXXXXXXXXXXXXXXXXXXXXXXXXXXXXXXXXXXXXXXXXXXXXXXXXXXXXXXXXXXX

SEQ ID NO: 24154 - protein, 413 aa, artificial
  consensus sequence
  misc_feature (1)..(15): Xaa can be any naturally occurring amino acid
  misc_feature (17)..(17): Xaa can be any naturally occurring amino acid
  misc_feature (21)..(22): Xaa can be any naturally occurring amino acid
  misc_feature (25)..(25): Xaa can be any naturally occurring amino acid
  misc_feature (33)..(34): Xaa can be any naturally occurring amino acid
  misc_feature (36)..(39): Xaa can be any naturally occurring amino acid
  misc_feature (41)..(43): Xaa can be any naturally occurring amino acid
  misc_feature (45)..(46): Xaa can be any naturally occurring amino acid
  misc_feature (48)..(52): Xaa can be any naturally occurring amino acid
  misc_feature (54)..(69): Xaa can be any naturally occurring amino acid
  misc_feature (71)..(81): Xaa can be any naturally occurring amino acid
  misc_feature (84)..(91): Xaa can be any naturally occurring amino acid
  misc_feature (110)..(110): Xaa can be any naturally occurring amino acid
  misc_feature (121)..(121): Xaa can be any naturally occurring amino acid
  misc_feature (127)..(127): Xaa can be any naturally occurring amino acid
  misc_feature (130)..(130): Xaa can be any naturally occurring amino acid
  misc_feature (133)..(166): Xaa can be any naturally occurring amino acid
  misc_feature (168)..(250): Xaa can be any naturally occurring amino acid
  misc_feature (252)..(259): Xaa can be any naturally occurring amino acid
  misc_feature (261)..(262): Xaa can be any naturally occurring amino acid
  misc_feature (264)..(265): Xaa can be any naturally occurring amino acid
  misc_feature (268)..(285): Xaa can be any naturally occurring amino acid
  misc_feature (287)..(333): Xaa can be any naturally occurring amino acid
  misc_feature (336)..(337): Xaa can be any naturally occurring amino acid
  misc_feature (340)..(340): Xaa can be any naturally occurring amino acid
  misc_feature (345)..(368): Xaa can be any naturally occurring amino acid
  misc_feature (370)..(406): Xaa can be any naturally occurring amino acid
  misc_feature (409)..(413): Xaa can be any naturally occurring amino acid
XXXXXXXXXXXXXXXRXPFTXXQWXELEHQALXXKXXXXGXXXPXXLXXXXXRXXXXXXXXXXXXXXXXPXXXXXXXXXXXMGXXXXXXXXDPEPGRCRRTDGKKWRCSXEAYPDSKYCEXHMHRGXNRXRKXXXXXXXXXXXXXXXXXXXXXXXXXXXXXXXXXXSXXXXXXXXXXXXXXXXXXXXXXXXXXXXXXXXXXXXXXXXXXXXXXXXXXXXXXXXXXXXXXXXXXXXXXXXXXXXXXXXXXXYXXXXXXXXGXXEXXFFXXXXXXXXXXXXXXXXXXQXXXXXXXXXXXXXXXXXXXXXXXXXXXXXXXXXXXXXXXXXXXXXXXQQXXCFXLGADXXXXXXXXXXXXXXXXXXXXXXXXEXXXXXXXXXXXXXXXXXXXXXXXXXXXXXXXXXXXXXSRXXXXX

SEQ ID NO: 24155 - protein, 610 aa, artificial
  consensus sequence
  misc_feature (1)..(81): Xaa can be any naturally occurring amino acid
  misc_feature (83)..(97): Xaa can be any naturally occurring amino acid
  misc_feature (99)..(102): Xaa can be any naturally occurring amino acid
  misc_feature (104)..(105): Xaa can be any naturally occurring amino acid
  misc_feature (107)..(109): Xaa can be any naturally occurring amino acid
  misc_feature (112)..(113): Xaa can be any naturally occurring amino acid
  misc_feature (115)..(116): Xaa can be any naturally occurring amino acid
  misc_feature (118)..(119): Xaa can be any naturally occurring amino acid
  misc_feature (121)..(123): Xaa can be any naturally occurring amino acid
  misc_feature (125)..(125): Xaa can be any naturally occurring amino acid
  misc_feature (127)..(135): Xaa can be any naturally occurring amino acid
  misc_feature (137)..(139): Xaa can be any naturally occurring amino acid
  misc_feature (141)..(145): Xaa can be any naturally occurring amino acid
  misc_feature (147)..(610): Xaa can be any naturally occurring amino acid
XXXXXXXXXXXXXXXXXXXXXXXXXXXXXXXXXXXXXXXXXXXXXXXXXXXXXXXXXXXXXXXXXXXXXXXXXXXXXXXXXFXXXXXXXXXXXXXXXKXXXXGXXRXXXKCXXKXXNXXKXXXRXKXXXXXXXXXKXXXFXXXXXAXXXXXXXXXXXXXXXXXXXXXXXXXXXXXXXXXXXXXXXXXXXXXXXXXXXXXXXXXXXXXXXXXXXXXXXXXXXXXXXXXXXXXXXXXXXXXXXXXXXXXXXXXXXXXXXXXXXXXXXXXXXXXXXXXXXXXXXXXXXXXXXXXXXXXXXXXXXXXXXXXXXXXXXXXXXXXXXXXXXXXXXXXXXXXXXXXXXXXXXXXXXXXXXXXXXXXXXXXXXXXXXXXXXXXXXXXXXXXXXXXXXXXXXXXXXXXXXXXXXXXXXXXXXXXXXXXXXXXXXXXXXXXXXXXXXXXXXXXXXXXXXXXXXXXXXXXXXXXXXXXXXXXXXXXXXXXXXXXXXXXXXXXXXXXXXXXXXXXXXXXXXXXXXXXXXXXXXXXXXXXXXXXXXXXXXXXXXXXXXXXXXXXXXXXXXXXXXXXXXXXXXXXXXXXXXXXXXXXXXXXXXXXXXXXXXXXXXXXXXXXXXX

SEQ ID NO: 24156 - protein, 738 aa, artificial
  consensus sequence
  misc_feature (1)..(22): Xaa can be any naturally occurring amino acid
  misc_feature (24)..(24): Xaa can be any naturally occurring amino acid
  misc_feature (27)..(30): Xaa can be any naturally occurring amino acid
  misc_feature (32)..(35): Xaa can be any naturally occurring amino acid
  misc_feature (37)..(79): Xaa can be any naturally occurring amino acid
  misc_feature (81)..(83): Xaa can be any naturally occurring amino acid
  misc_feature (85)..(87): Xaa can be any naturally occurring amino acid
  misc_feature (89)..(96): Xaa can be any naturally occurring amino acid
  misc_feature (98)..(99): Xaa can be any naturally occurring amino acid
  misc_feature (101)..(102): Xaa can be any naturally occurring amino acid
  misc_feature (105)..(120): Xaa can be any naturally occurring amino acid
  misc_feature (122)..(123): Xaa can be any naturally occurring amino acid
  misc_feature (125)..(133): Xaa can be any naturally occurring amino acid
  misc_feature (142)..(142): Xaa can be any naturally occurring amino acid
  misc_feature (144)..(145): Xaa can be any naturally occurring amino acid
  misc_feature (151)..(151): Xaa can be any naturally occurring amino acid
  misc_feature (154)..(154): Xaa can be any naturally occurring amino acid
  misc_feature (156)..(156): Xaa can be any naturally occurring amino acid
  misc_feature (158)..(164): Xaa can be any naturally occurring amino acid
  misc_feature (167)..(168): Xaa can be any naturally occurring amino acid
  misc_feature (170)..(171): Xaa can be any naturally occurring amino acid
  misc_feature (174)..(175): Xaa can be any naturally occurring amino acid
  misc_feature (177)..(177): Xaa can be any naturally occurring amino acid
  misc_feature (180)..(180): Xaa can be any naturally occurring amino acid
  misc_feature (186)..(186): Xaa can be any naturally occurring amino acid
  misc_feature (188)..(189): Xaa can be any naturally occurring amino acid
  misc_feature (191)..(192): Xaa can be any naturally occurring amino acid
  misc_feature (195)..(195): Xaa can be any naturally occurring amino acid
  misc_feature (199)..(201): Xaa can be any naturally occurring amino acid
  misc_feature (204)..(205): Xaa can be any naturally occurring amino acid
  misc_feature (208)..(209): Xaa can be any naturally occurring amino acid
  misc_feature (213)..(216): Xaa can be any naturally occurring amino acid
  misc_feature (221)..(221): Xaa can be any naturally occurring amino acid
  misc_feature (226)..(228): Xaa can be any naturally occurring amino acid
  misc_feature (233)..(233): Xaa can be any naturally occurring amino acid
  misc_feature (237)..(238): Xaa can be any naturally occurring amino acid
  misc_feature (242)..(245): Xaa can be any naturally occurring amino acid
  misc_feature (247)..(247): Xaa can be any naturally occurring amino acid
  misc_feature (250)..(250): Xaa can be any naturally occurring amino acid
  misc_feature (254)..(260): Xaa can be any naturally occurring amino acid
  misc_feature (263)..(265): Xaa can be any naturally occurring amino acid
  misc_feature (267)..(279): Xaa can be any naturally occurring amino acid
  misc_feature (281)..(283): Xaa can be any naturally occurring amino acid
  misc_feature (285)..(285): Xaa can be any naturally occurring amino acid
  misc_feature (287)..(289): Xaa can be any naturally occurring amino acid
  misc_feature (292)..(292): Xaa can be any naturally occurring amino acid
  misc_feature (294)..(294): Xaa can be any naturally occurring amino acid
  misc_feature (299)..(299): Xaa can be any naturally occurring amino acid
  misc_feature (303)..(303): Xaa can be any naturally occurring amino acid
  misc_feature (305)..(305): Xaa can be any naturally occurring amino acid
  misc_feature (312)..(314): Xaa can be any naturally occurring amino acid
  misc_feature (321)..(321): Xaa can be any naturally occurring amino acid
  misc_feature (323)..(324): Xaa can be any naturally occurring amino acid
  misc_feature (326)..(326): Xaa can be any naturally occurring amino acid
  misc_feature (329)..(330): Xaa can be any naturally occurring amino acid
  misc_feature (333)..(334): Xaa can be any naturally occurring amino acid
  misc_feature (337)..(337): Xaa can be any naturally occurring amino acid
  misc_feature (341)..(344): Xaa can be any naturally occurring amino acid
  misc_feature (347)..(347): Xaa can be any naturally occurring amino acid
  misc_feature (352)..(352): Xaa can be any naturally occurring amino acid
  misc_feature (354)..(357): Xaa can be any naturally occurring amino acid
  misc_feature (359)..(359): Xaa can be any naturally occurring amino acid
  misc_feature (361)..(365): Xaa can be any naturally occurring amino acid
  misc_feature (372)..(372): Xaa can be any naturally occurring amino acid
  misc_feature (378)..(379): Xaa can be any naturally occurring amino acid
  misc_feature (386)..(386): Xaa can be any naturally occurring amino acid
  misc_feature (388)..(388): Xaa can be any naturally occurring amino acid
  misc_feature (391)..(396): Xaa can be any naturally occurring amino acid
  misc_feature (398)..(398): Xaa can be any naturally occurring amino acid
  misc_feature (401)..(401): Xaa can be any naturally occurring amino acid
  misc_feature (410)..(416): Xaa can be any naturally occurring amino acid
  misc_feature (418)..(422): Xaa can be any naturally occurring amino acid
  misc_feature (425)..(425): Xaa can be any naturally occurring amino acid
  misc_feature (430)..(432): Xaa can be any naturally occurring amino acid
  misc_feature (439)..(442): Xaa can be any naturally occurring amino acid
  misc_feature (444)..(447): Xaa can be any naturally occurring amino acid
  misc_feature (449)..(461): Xaa can be any naturally occurring amino acid
  misc_feature (464)..(465): Xaa can be any naturally occurring amino acid
  misc_feature (467)..(468): Xaa can be any naturally occurring amino acid
  misc_feature (470)..(477): Xaa can be any naturally occurring amino acid
  misc_feature (483)..(484): Xaa can be any naturally occurring amino acid
  misc_feature (487)..(487): Xaa can be any naturally occurring amino acid
  misc_feature (489)..(490): Xaa can be any naturally occurring amino acid
  misc_feature (492)..(500): Xaa can be any naturally occurring amino acid
  misc_feature (502)..(504): Xaa can be any naturally occurring amino acid
  misc_feature (506)..(508): Xaa can be any naturally occurring amino acid
  misc_feature (510)..(510): Xaa can be any naturally occurring amino acid
  misc_feature (515)..(516): Xaa can be any naturally occurring amino acid
  misc_feature (518)..(523): Xaa can be any naturally occurring amino acid
  misc_feature (525)..(541): Xaa can be any naturally occurring amino acid
  misc_feature (543)..(552): Xaa can be any naturally occurring amino acid
  misc_feature (554)..(561): Xaa can be any naturally occurring amino acid
  misc_feature (563)..(563): Xaa can be any naturally occurring amino acid
  misc_feature (565)..(565): Xaa can be any naturally occurring amino acid
  misc_feature (570)..(570): Xaa can be any naturally occurring amino acid
  misc_feature (572)..(572): Xaa can be any naturally occurring amino acid
  misc_feature (576)..(576): Xaa can be any naturally occurring amino acid
  misc_feature (578)..(578): Xaa can be any naturally occurring amino acid
  misc_feature (580)..(582): Xaa can be any naturally occurring amino acid
  misc_feature (585)..(589): Xaa can be any naturally occurring amino acid
  misc_feature (593)..(593): Xaa can be any naturally occurring amino acid
  misc_feature (596)..(596): Xaa can be any naturally occurring amino acid
  misc_feature (601)..(601): Xaa can be any naturally occurring amino acid
  misc_feature (604)..(604): Xaa can be any naturally occurring amino acid
  misc_feature (606)..(608): Xaa can be any naturally occurring amino acid
  misc_feature (610)..(611): Xaa can be any naturally occurring amino acid
  misc_feature (613)..(614): Xaa can be any naturally occurring amino acid
  misc_feature (617)..(619): Xaa can be any naturally occurring amino acid
  misc_feature (621)..(624): Xaa can be any naturally occurring amino acid
  misc_feature (629)..(629): Xaa can be any naturally occurring amino acid
  misc_feature (631)..(631): Xaa can be any naturally occurring amino acid
  misc_feature (635)..(638): Xaa can be any naturally occurring amino acid
  misc_feature (640)..(641): Xaa can be any naturally occurring amino acid
  misc_feature (645)..(645): Xaa can be any naturally occurring amino acid
  misc_feature (649)..(650): Xaa can be any naturally occurring amino acid
  misc_feature (652)..(655): Xaa can be any naturally occurring amino acid
  misc_feature (657)..(657): Xaa can be any naturally occurring amino acid
  misc_feature (661)..(661): Xaa can be any naturally occurring amino acid
  misc_feature (665)..(665): Xaa can be any naturally occurring amino acid
  misc_feature (667)..(668): Xaa can be any naturally occurring amino acid
  misc_feature (670)..(672): Xaa can be any naturally occurring amino acid
  misc_feature (674)..(674): Xaa can be any naturally occurring amino acid
  misc_feature (676)..(677): Xaa can be any naturally occurring amino acid
  misc_feature (679)..(680): Xaa can be any naturally occurring amino acid
  misc_feature (683)..(683): Xaa can be any naturally occurring amino acid
  misc_feature (686)..(686): Xaa can be any naturally occurring amino acid
  misc_feature (690)..(690): Xaa can be any naturally occurring amino acid
  misc_feature (692)..(696): Xaa can be any naturally occurring amino acid
  misc_feature (698)..(699): Xaa can be any naturally occurring amino acid
  misc_feature (701)..(701): Xaa can be any naturally occurring amino acid
  misc_feature (707)..(707): Xaa can be any naturally occurring amino acid
  misc_feature (709)..(710): Xaa can be any naturally occurring amino acid
  misc_feature (713)..(715): Xaa can be any naturally occurring amino acid
  misc_feature (717)..(719): Xaa can be any naturally occurring amino acid
  misc_feature (721)..(723): Xaa can be any naturally occurring amino acid
  misc_feature (728)..(738): Xaa can be any naturally occurring amino acid
XXXXXXXXXXXXXXXXXXXXXXKXDGXXXXFXXXXIXXXXXXXXXXXXXXXXXXXXXXXXXXXXXXXXXXXXXXXXXXXIXXXVXXXLXXXXXXXXAXXYXXYRXXXXXXXXXXXXXXXXIXXLXXXXXXXXXNENANKDSXVXXTQRDLXAGXVXKXXXXXXXLPXXVXXAHXXGXIHXHDLDYXPXXPXXNCXLIDXXXMLXXGFXXGNAXXXXPKSIXTATAXXXQIIAXVASXXYGGXXXXRXDEXLAPXXXXXXXKHXXXAXXXXXXXXXXXXXAXXXTXKXXXDAXQXLEYEXNTLXTXNGQTPFXXXGFGLGTXWXXRXIQXXILXXRIXGLGXXXXTAXFPKLXFXXXXGXNXXXXXPNYDIKXLALECXXKRMYPDXLXYDXXXXXXGXFKXPMGCRSFLXXXXXXXGXXXXXGRXNLGVXXXNLPRIAXXXXGXXXXFXXXXXXXXXXXXXALXXRXXRXXXXXXXXAPILYXXGAXGXXLXXXXXXXXXFXXXRXXXSXGYIGXXEXXXXXXGXXXXXXXXXXXXXXXXXIXXXXXXXXXXWXXXXXXXXSXYXTPSEXLXDRFXRXDXXXFGXXXXXTDKXYYXNSFHXDVXKXXXPXXKXXFEXXXPXXXXGGFIXYXEYPXXXXNXXALEXVWDXXYXXXXYXGTNXPIDXCXXCXXXGXFXXTXXGFXCPXCGNXDXXXXXVXXRXCGYLGXPXXRPXXXGXXXEXXXRVKHXXXXXXXXXXX

SEQ ID NO: 24157 - protein, 302 aa, artificial
  consensus sequence
  misc_feature (1)..(63): Xaa can be any naturally occurring amino acid
  misc_feature (65)..(75): Xaa can be any naturally occurring amino acid
  misc_feature (77)..(79): Xaa can be any naturally occurring amino acid
  misc_feature (81)..(84): Xaa can be any naturally occurring amino acid
  misc_feature (86)..(102): Xaa can be any naturally occurring amino acid
  misc_feature (104)..(108): Xaa can be any naturally occurring amino acid
  misc_feature (110)..(111): Xaa can be any naturally occurring amino acid
  misc_feature (113)..(120): Xaa can be any naturally occurring amino acid
  misc_feature (122)..(136): Xaa can be any naturally occurring amino acid
  misc_feature (139)..(149): Xaa can be any naturally occurring amino acid
  misc_feature (151)..(302): Xaa can be any naturally occurring amino acid
XXXXXXXXXXXXXXXXXXXXXXXXXXXXXXXXXXXXXXXXXXXXXXXXXXXXXXXXXXXXXXXRXXXXXXXXXXXPXXXDXXXXRXXXXXXXXXXXXXXXXXVXXXXXRXXLXXXXXXXXVXXXXXXXXXXXXXXXPWXXXXXXXXXXXTXXXXXXXXXXXXXXXXXXXXXXXXXXXXXXXXXXXXXXXXXXXXXXXXXXXXXXXXXXXXXXXXXXXXXXXXXXXXXXXXXXXXXXXXXXXXXXXXXXXXXXXXXXXXXXXXXXXXXXXXXXXXXXXXXXXXXXXXXXXXXXXXXXXXXXXX

SEQ ID NO: 24158 - protein, 208 aa, artificial
  consensus sequence
  misc_feature (1)..(17): Xaa can be any naturally occurring amino acid
  misc_feature (20)..(21): Xaa can be any naturally occurring amino acid
  misc_feature (23)..(30): Xaa can be any naturally occurring amino acid
  misc_feature (32)..(32): Xaa can be any naturally occurring amino acid
  misc_feature (34)..(34): Xaa can be any naturally occurring amino acid
  misc_feature (36)..(43): Xaa can be any naturally occurring amino acid
  misc_feature (45)..(46): Xaa can be any naturally occurring amino acid
  misc_feature (48)..(64): Xaa can be any naturally occurring amino acid
  misc_feature (66)..(66): Xaa can be any naturally occurring amino acid
  misc_feature (68)..(76): Xaa can be any naturally occurring amino acid
  misc_feature (78)..(79): Xaa can be any naturally occurring amino acid
  misc_feature (81)..(82): Xaa can be any naturally occurring amino acid
  misc_feature (84)..(84): Xaa can be any naturally occurring amino acid
  misc_feature (88)..(92): Xaa can be any naturally occurring amino acid
  misc_feature (94)..(94): Xaa can be any naturally occurring amino acid
  misc_feature (96)..(98): Xaa can be any naturally occurring amino acid
  misc_feature (100)..(101): Xaa can be any naturally occurring amino acid
  misc_feature (103)..(110): Xaa can be any naturally occurring amino acid
  misc_feature (112)..(112): Xaa can be any naturally occurring amino acid
  misc_feature (114)..(114): Xaa can be any naturally occurring amino acid
  misc_feature (117)..(117): Xaa can be any naturally occurring amino acid
  misc_feature (125)..(125): Xaa can be any naturally occurring amino acid
  misc_feature (129)..(132): Xaa can be any naturally occurring amino acid
  misc_feature (134)..(134): Xaa can be any naturally occurring amino acid
  misc_feature (141)..(141): Xaa can be any naturally occurring amino acid
  misc_feature (143)..(143): Xaa can be any naturally occurring amino acid
  misc_feature (145)..(145): Xaa can be any naturally occurring amino acid
  misc_feature (150)..(152): Xaa can be any naturally occurring amino acid
  misc_feature (154)..(154): Xaa can be any naturally occurring amino acid
  misc_feature (156)..(156): Xaa can be any naturally occurring amino acid
  misc_feature (159)..(159): Xaa can be any naturally occurring amino acid
  misc_feature (166)..(166): Xaa can be any naturally occurring amino acid
  misc_feature (168)..(168): Xaa can be any naturally occurring amino acid
  misc_feature (170)..(171): Xaa can be any naturally occurring amino acid
  misc_feature (173)..(177): Xaa can be any naturally occurring amino acid
  misc_feature (180)..(181): Xaa can be any naturally occurring amino acid
  misc_feature (183)..(183): Xaa can be any naturally occurring amino acid
  misc_feature (188)..(189): Xaa can be any naturally occurring amino acid
  misc_feature (192)..(193): Xaa can be any naturally occurring amino acid
  misc_feature (195)..(195): Xaa can be any naturally occurring amino acid
  misc_feature (202)..(208): Xaa can be any naturally occurring amino acid
XXXXXXXXXXXXXXXXXPGXXLXXXXXXXXGXGXYXXXXXXXXSXXGXXXXXXXXXXXXXXXXXVXVXXXXXXXXXPXXGXXVXARVXXXXXRXAXXXIXXVXXXXXXXXFXGXIRXQDVRATEXDKVXXXXSXRPGDIVXAXVXSLGDXXXYXLXTAXNELGVVXAXSXXGXXXXXVPXXWXEMQCXXTGXXEXRKVAKVXXXXXXX

SEQ ID NO: 24159 - protein, 261 aa, artificial
  consensus sequence
  misc_feature (1)..(17): Xaa can be any naturally occurring amino acid
  misc_feature (20)..(28): Xaa can be any naturally occurring amino acid
  misc_feature (30)..(30): Xaa can be any naturally occurring amino acid
  misc_feature (34)..(36): Xaa can be any naturally occurring amino acid
  misc_feature (39)..(64): Xaa can be any naturally occurring amino acid
  misc_feature (66)..(68): Xaa can be any naturally occurring amino acid
  misc_feature (70)..(72): Xaa can be any naturally occurring amino acid
  misc_feature (74)..(77): Xaa can be any naturally occurring amino acid
  misc_feature (80)..(80): Xaa can be any naturally occurring amino acid
  misc_feature (82)..(83): Xaa can be any naturally occurring amino acid
  misc_feature (87)..(87): Xaa can be any naturally occurring amino acid
  misc_feature (89)..(90): Xaa can be any naturally occurring amino acid
  misc_feature (94)..(102): Xaa can be any naturally occurring amino acid
  misc_feature (104)..(106): Xaa can be any naturally occurring amino acid
  misc_feature (108)..(109): Xaa can be any naturally occurring amino acid
  misc_feature (111)..(111): Xaa can be any naturally occurring amino acid
  misc_feature (114)..(117): Xaa can be any naturally occurring amino acid
  misc_feature (120)..(130): Xaa can be any naturally occurring amino acid
  misc_feature (134)..(136): Xaa can be any naturally occurring amino acid
  misc_feature (138)..(153): Xaa can be any naturally occurring amino acid
  misc_feature (157)..(159): Xaa can be any naturally occurring amino acid
  misc_feature (161)..(163): Xaa can be any naturally occurring amino acid
  misc_feature (165)..(165): Xaa can be any naturally occurring amino acid
  misc_feature (167)..(169): Xaa can be any naturally occurring amino acid
  misc_feature (172)..(172): Xaa can be any naturally occurring amino acid
  misc_feature (174)..(176): Xaa can be any naturally occurring amino acid
  misc_feature (178)..(214): Xaa can be any naturally occurring amino acid
  misc_feature (216)..(241): Xaa can be any naturally occurring amino acid
  misc_feature (246)..(246): Xaa can be any naturally occurring amino acid
  misc_feature (248)..(248): Xaa can be any naturally occurring amino acid
  misc_feature (257)..(261): Xaa can be any naturally occurring amino acid
XXXXXXXXXXXXXXXXXYGXXXXXXXXXYXNPIXXXGGXXXXXXXXXXXXXXXXXXXXXXXXXXHXXXGXXXGXXXXTGXGXXTGGXGXXGYGXXXXXXXXXGXXXTXXGXGTXXXXGGXXXXXXXXXXXGTEXXXGXXXXXXXXXXXXXXXXGTGXXXGXXXGXGXXXTGXGXXXGXXXXXXXXXXXXXXXXXXXXXXXXXXXXXXXXXXXXXGXXXXXXXXXXXXXXXXXXXXXXXXXXEKKGXMXKIKEKLPGXXXXX

SEQ ID NO: 24160 - protein, 84 aa, artificial
  consensus sequence
  misc_feature (1)..(1): Xaa can be any naturally occurring amino acid
  misc_feature (15)..(15): Xaa can be any naturally occurring amino acid
  misc_feature (27)..(27): Xaa can be any naturally occurring amino acid
  misc_feature (55)..(55): Xaa can be any naturally occurring amino acid
XTRTNKWTEREGKAXPKYFSHTGNYGXSPNHIKKQGSGKGNWGKPGDEIDDLIDXGEIPPVFKKDRRGSNLQSHEQKFENVQKE

SEQ ID NO: 24161 - protein, 128 aa, artificial
  consensus sequence
  misc_feature (1)..(26): Xaa can be any naturally occurring amino acid
  misc_feature (28)..(28): Xaa can be any naturally occurring amino acid
  misc_feature (30)..(34): Xaa can be any naturally occurring amino acid
  misc_feature (36)..(37): Xaa can be any naturally occurring amino acid
  misc_feature (39)..(40): Xaa can be any naturally occurring amino acid
  misc_feature (44)..(48): Xaa can be any naturally occurring amino acid
  misc_feature (50)..(51): Xaa can be any naturally occurring amino acid
  misc_feature (55)..(55): Xaa can be any naturally occurring amino acid
  misc_feature (57)..(57): Xaa can be any naturally occurring amino acid
  misc_feature (61)..(61): Xaa can be any naturally occurring amino acid
  misc_feature (65)..(72): Xaa can be any naturally occurring amino acid
  misc_feature (77)..(83): Xaa can be any naturally occurring amino acid
  misc_feature (88)..(90): Xaa can be any naturally occurring amino acid
  misc_feature (92)..(93): Xaa can be any naturally occurring amino acid
  misc_feature (95)..(102): Xaa can be any naturally occurring amino acid
  misc_feature (104)..(112): Xaa can be any naturally occurring amino acid
  misc_feature (120)..(120): Xaa can be any naturally occurring amino acid
  misc_feature (123)..(123): Xaa can be any naturally occurring amino acid
  misc_feature (127)..(127): Xaa can be any naturally occurring amino acid
XXXXXXXXXXXXXXXXXXXXXXXXXXYXQXXXXXGXXPXXGYPXXXXXKXXYPPXGXYPPXGYPXXXXXXXXQGYPXXXXXXXQGYPXXXYXXQXXXXXXXXQXXXXXXXXXGCLAALCXCCXLDAXF

SEQ ID NO: 24162 - protein, 523 aa, artificial
  consensus sequence
  misc_feature (1)..(50): Xaa can be any naturally occurring amino acid
  misc_feature (52)..(53): Xaa can be any naturally occurring amino acid
  misc_feature (55)..(56): Xaa can be any naturally occurring amino acid
  misc_feature (59)..(59): Xaa can be any naturally occurring amino acid
  misc_feature (62)..(62): Xaa can be any naturally occurring amino acid
  misc_feature (64)..(69): Xaa can be any naturally occurring amino acid
  misc_feature (72)..(72): Xaa can be any naturally occurring amino acid
  misc_feature (74)..(75): Xaa can be any naturally occurring amino acid
  misc_feature (77)..(77): Xaa can be any naturally occurring amino acid
  misc_feature (80)..(83): Xaa can be any naturally occurring amino acid
  misc_feature (85)..(85): Xaa can be any naturally occurring amino acid
  misc_feature (88)..(90): Xaa can be any naturally occurring amino acid
  misc_feature (92)..(92): Xaa can be any naturally occurring amino acid
  misc_feature (96)..(96): Xaa can be any naturally occurring amino acid
  misc_feature (98)..(98): Xaa can be any naturally occurring amino acid
  misc_feature (100)..(100): Xaa can be any naturally occurring amino acid
  misc_feature (106)..(109): Xaa can be any naturally occurring amino acid
  misc_feature (111)..(111): Xaa can be any naturally occurring amino acid
  misc_feature (113)..(115): Xaa can be any naturally occurring amino acid
  misc_feature (118)..(118): Xaa can be any naturally occurring amino acid
  misc_feature (127)..(128): Xaa can be any naturally occurring amino acid
  misc_feature (133)..(133): Xaa can be any naturally occurring amino acid
  misc_feature (135)..(135): Xaa can be any naturally occurring amino acid
  misc_feature (140)..(140): Xaa can be any naturally occurring amino acid
  misc_feature (145)..(145): Xaa can be any naturally occurring amino acid
  misc_feature (153)..(154): Xaa can be any naturally occurring amino acid
  misc_feature (162)..(162): Xaa can be any naturally occurring amino acid
  misc_feature (164)..(164): Xaa can be any naturally occurring amino acid
  misc_feature (166)..(166): Xaa can be any naturally occurring amino acid
  misc_feature (168)..(168): Xaa can be any naturally occurring amino acid
  misc_feature (170)..(170): Xaa can be any naturally occurring amino acid
  misc_feature (172)..(172): Xaa can be any naturally occurring amino acid
  misc_feature (175)..(176): Xaa can be any naturally occurring amino acid
  misc_feature (178)..(182): Xaa can be any naturally occurring amino acid
  misc_feature (184)..(184): Xaa can be any naturally occurring amino acid
  misc_feature (186)..(196): Xaa can be any naturally occurring amino acid
  misc_feature (198)..(199): Xaa can be any naturally occurring amino acid
  misc_feature (201)..(203): Xaa can be any naturally occurring amino acid
  misc_feature (205)..(216): Xaa can be any naturally occurring amino acid
  misc_feature (218)..(218): Xaa can be any naturally occurring amino acid
  misc_feature (220)..(228): Xaa can be any naturally occurring amino acid
  misc_feature (230)..(233): Xaa can be any naturally occurring amino acid
  misc_feature (236)..(238): Xaa can be any naturally occurring amino acid
  misc_feature (240)..(243): Xaa can be any naturally occurring amino acid
  misc_feature (246)..(248): Xaa can be any naturally occurring amino acid
  misc_feature (251)..(251): Xaa can be any naturally occurring amino acid
  misc_feature (253)..(256): Xaa can be any naturally occurring amino acid
  misc_feature (260)..(262): Xaa can be any naturally occurring amino acid
  misc_feature (264)..(266): Xaa can be any naturally occurring amino acid
  misc_feature (270)..(271): Xaa can be any naturally occurring amino acid
  misc_feature (275)..(275): Xaa can be any naturally occurring amino acid
  misc_feature (278)..(279): Xaa can be any naturally occurring amino acid
  misc_feature (282)..(283): Xaa can be any naturally occurring amino acid
  misc_feature (286)..(287): Xaa can be any naturally occurring amino acid
  misc_feature (289)..(295): Xaa can be any naturally occurring amino acid
  misc_feature (297)..(298): Xaa can be any naturally occurring amino acid
  misc_feature (301)..(301): Xaa can be any naturally occurring amino acid
  misc_feature (304)..(305): Xaa can be any naturally occurring amino acid
  misc_feature (307)..(307): Xaa can be any naturally occurring amino acid
  misc_feature (310)..(310): Xaa can be any naturally occurring amino acid
  misc_feature (318)..(318): Xaa can be any naturally occurring amino acid
  misc_feature (322)..(322): Xaa can be any naturally occurring amino acid
  misc_feature (325)..(325): Xaa can be any naturally occurring amino acid
  misc_feature (327)..(329): Xaa can be any naturally occurring amino acid
  misc_feature (331)..(338): Xaa can be any naturally occurring amino acid
  misc_feature (341)..(343): Xaa can be any naturally occurring amino acid
  misc_feature (345)..(346): Xaa can be any naturally occurring amino acid
  misc_feature (349)..(349): Xaa can be any naturally occurring amino acid
  misc_feature (353)..(353): Xaa can be any naturally occurring amino acid
  misc_feature (356)..(358): Xaa can be any naturally occurring amino acid
  misc_feature (361)..(362): Xaa can be any naturally occurring amino acid
  misc_feature (364)..(365): Xaa can be any naturally occurring amino acid
  misc_feature (367)..(367): Xaa can be any naturally occurring amino acid
  misc_feature (369)..(369): Xaa can be any naturally occurring amino acid
  misc_feature (371)..(371): Xaa can be any naturally occurring amino acid
  misc_feature (373)..(373): Xaa can be any naturally occurring amino acid
  misc_feature (376)..(376): Xaa can be any naturally occurring amino acid
  misc_feature (378)..(378): Xaa can be any naturally occurring amino acid
  misc_feature (380)..(380): Xaa can be any naturally occurring amino acid
  misc_feature (383)..(384): Xaa can be any naturally occurring amino acid
  misc_feature (388)..(389): Xaa can be any naturally occurring amino acid
  misc_feature (396)..(396): Xaa can be any naturally occurring amino acid
  misc_feature (398)..(399): Xaa can be any naturally occurring amino acid
  misc_feature (406)..(406): Xaa can be any naturally occurring amino acid
  misc_feature (408)..(408): Xaa can be any naturally occurring amino acid
  misc_feature (411)..(411): Xaa can be any naturally occurring amino acid
  misc_feature (416)..(416): Xaa can be any naturally occurring amino acid
  misc_feature (421)..(421): Xaa can be any naturally occurring amino acid
  misc_feature (424)..(424): Xaa can be any naturally occurring amino acid
  misc_feature (427)..(428): Xaa can be any naturally occurring amino acid
  misc_feature (430)..(434): Xaa can be any naturally occurring amino acid
  misc_feature (438)..(438): Xaa can be any naturally occurring amino acid
  misc_feature (442)..(442): Xaa can be any naturally occurring amino acid
  misc_feature (444)..(445): Xaa can be any naturally occurring amino acid
  misc_feature (447)..(447): Xaa can be any naturally occurring amino acid
  misc_feature (451)..(452): Xaa can be any naturally occurring amino acid
  misc_feature (454)..(454): Xaa can be any naturally occurring amino acid
  misc_feature (459)..(459): Xaa can be any naturally occurring amino acid
  misc_feature (463)..(463): Xaa can be any naturally occurring amino acid
  misc_feature (465)..(467): Xaa can be any naturally occurring amino acid
  misc_feature (472)..(472): Xaa can be any naturally occurring amino acid
  misc_feature (475)..(476): Xaa can be any naturally occurring amino acid
  misc_feature (479)..(481): Xaa can be any naturally occurring amino acid
  misc_feature (484)..(486): Xaa can be any naturally occurring amino acid
  misc_feature (488)..(488): Xaa can be any naturally occurring amino acid
  misc_feature (494)..(494): Xaa can be any naturally occurring amino acid
  misc_feature (496)..(510): Xaa can be any naturally occurring amino acid
  misc_feature (512)..(515): Xaa can be any naturally occurring amino acid
  misc_feature (517)..(523): Xaa can be any naturally occurring amino acid
XXXXXXXXXXXXXXXXXXXXXXXXXXXXXXXXXXXXXXXXXXXXXXXXXXLXXRXXPGXYGXPXXXXXXDRXDXXYXQGXXXXFXSRXXXYXSTVXRXNXPPGPFXXXXPXVXXXLDXKSFPVLFDXXKVEKXDXFTGTXMPSTXLTGGYRVXXYLDPSEPXHXKXKXLXFXLLXXRXXXXXPXFXXXXXXXXXXXEXXLXXXGXXXXXXXXXXXXFXFXXXXXXXXXPXXXXLGXXXPXXXXKWXXXQLXPXXXXGLPXXXEXXXLHTXXLPPXLVXXDYXXLYXXFXXXXXXXLXXAEXLGXXRXEAXHNLLFATXFNSXGGXKXXXPXXXXXXXXAGXXXHXXLAXEIRXAVXXXGGXXTXXAXEXMXLXKSXVXEXLRXXPPVXXQYGRAKXDXXIESHDAXFXVKXGEMLXGYQPXATXDPXXFXXXXXEFVXDRFXGXXGXKLLXXVXWSNGXETEXPXXXNKQCXGKXXVVXXXRLXXXEXFLRYDXFXXXXXXXXXXXXXXXTXXXXAXXXXXXX

SEQ ID NO: 24163 - protein, 627 aa, artificial
  consensus sequence
  misc_feature (1)..(200): Xaa can be any naturally occurring amino acid
  misc_feature (202)..(202): Xaa can be any naturally occurring amino acid
  misc_feature (204)..(204): Xaa can be any naturally occurring amino acid
  misc_feature (207)..(220): Xaa can be any naturally occurring amino acid
  misc_feature (223)..(225): Xaa can be any naturally occurring amino acid
  misc_feature (228)..(232): Xaa can be any naturally occurring amino acid
  misc_feature (237)..(237): Xaa can be any naturally occurring amino acid
  misc_feature (239)..(239): Xaa can be any naturally occurring amino acid
  misc_feature (241)..(243): Xaa can be any naturally occurring amino acid
  misc_feature (245)..(246): Xaa can be any naturally occurring amino acid
  misc_feature (248)..(249): Xaa can be any naturally occurring amino acid
  misc_feature (252)..(252): Xaa can be any naturally occurring amino acid
  misc_feature (255)..(255): Xaa can be any naturally occurring amino acid
  misc_feature (259)..(259): Xaa can be any naturally occurring amino acid
  misc_feature (261)..(262): Xaa can be any naturally occurring amino acid
  misc_feature (264)..(265): Xaa can be any naturally occurring amino acid
  misc_feature (267)..(268): Xaa can be any naturally occurring amino acid
  misc_feature (271)..(273): Xaa can be any naturally occurring amino acid
  misc_feature (275)..(275): Xaa can be any naturally occurring amino acid
  misc_feature (278)..(281): Xaa can be any naturally occurring amino acid
  misc_feature (283)..(283): Xaa can be any naturally occurring amino acid
  misc_feature (285)..(286): Xaa can be any naturally occurring amino acid
  misc_feature (291)..(291): Xaa can be any naturally occurring amino acid
  misc_feature (293)..(313): Xaa can be any naturally occurring amino acid
  misc_feature (315)..(321): Xaa can be any naturally occurring amino acid
  misc_feature (323)..(323): Xaa can be any naturally occurring amino acid
  misc_feature (329)..(333): Xaa can be any naturally occurring amino acid
  misc_feature (336)..(337): Xaa can be any naturally occurring amino acid
  misc_feature (339)..(344): Xaa can be any naturally occurring amino acid
  misc_feature (346)..(347): Xaa can be any naturally occurring amino acid
  misc_feature (349)..(350): Xaa can be any naturally occurring amino acid
  misc_feature (352)..(363): Xaa can be any naturally occurring amino acid
  misc_feature (365)..(366): Xaa can be any naturally occurring amino acid
  misc_feature (368)..(375): Xaa can be any naturally occurring amino acid
  misc_feature (378)..(380): Xaa can be any naturally occurring amino acid
  misc_feature (385)..(385): Xaa can be any naturally occurring amino acid
  misc_feature (387)..(387): Xaa can be any naturally occurring amino acid
  misc_feature (389)..(390): Xaa can be any naturally occurring amino acid
  misc_feature (393)..(393): Xaa can be any naturally occurring amino acid
  misc_feature (395)..(396): Xaa can be any naturally occurring amino acid
  misc_feature (398)..(400): Xaa can be any naturally occurring amino acid
  misc_feature (402)..(405): Xaa can be any naturally occurring amino acid
  misc_feature (407)..(411): Xaa can be any naturally occurring amino acid
  misc_feature (417)..(418): Xaa can be any naturally occurring amino acid
  misc_feature (421)..(422): Xaa can be any naturally occurring amino acid
  misc_feature (426)..(426): Xaa can be any naturally occurring amino acid
  misc_feature (428)..(428): Xaa can be any naturally occurring amino acid
  misc_feature (430)..(430): Xaa can be any naturally occurring amino acid
  misc_feature (432)..(432): Xaa can be any naturally occurring amino acid
  misc_feature (436)..(436): Xaa can be any naturally occurring amino acid
  misc_feature (440)..(440): Xaa can be any naturally occurring amino acid
  misc_feature (443)..(445): Xaa can be any naturally occurring amino acid
  misc_feature (447)..(447): Xaa can be any naturally occurring amino acid
  misc_feature (450)..(451): Xaa can be any naturally occurring amino acid
  misc_feature (453)..(453): Xaa can be any naturally occurring amino acid
  misc_feature (460)..(460): Xaa can be any naturally occurring amino acid
  misc_feature (463)..(464): Xaa can be any naturally occurring amino acid
  misc_feature (467)..(467): Xaa can be any naturally occurring amino acid
  misc_feature (470)..(471): Xaa can be any naturally occurring amino acid
  misc_feature (482)..(482): Xaa can be any naturally occurring amino acid
  misc_feature (485)..(485): Xaa can be any naturally occurring amino acid
  misc_feature (491)..(492): Xaa can be any naturally occurring amino acid
  misc_feature (495)..(495): Xaa can be any naturally occurring amino acid
  misc_feature (499)..(499): Xaa can be any naturally occurring amino acid
  misc_feature (502)..(502): Xaa can be any naturally occurring amino acid
  misc_feature (506)..(506): Xaa can be any naturally occurring amino acid
  misc_feature (508)..(508): Xaa can be any naturally occurring amino acid
  misc_feature (510)..(511): Xaa can be any naturally occurring amino acid
  misc_feature (524)..(525): Xaa can be any naturally occurring amino acid
  misc_feature (527)..(529): Xaa can be any naturally occurring amino acid
  misc_feature (531)..(531): Xaa can be any naturally occurring amino acid
  misc_feature (534)..(535): Xaa can be any naturally occurring amino acid
  misc_feature (537)..(537): Xaa can be any naturally occurring amino acid
  misc_feature (544)..(544): Xaa can be any naturally occurring amino acid
  misc_feature (549)..(550): Xaa can be any naturally occurring amino acid
  misc_feature (552)..(552): Xaa can be any naturally occurring amino acid
  misc_feature (555)..(555): Xaa can be any naturally occurring amino acid
  misc_feature (557)..(559): Xaa can be any naturally occurring amino acid
  misc_feature (564)..(564): Xaa can be any naturally occurring amino acid
  misc_feature (568)..(568): Xaa can be any naturally occurring amino acid
  misc_feature (570)..(575): Xaa can be any naturally occurring amino acid
  misc_feature (577)..(582): Xaa can be any naturally occurring amino acid
  misc_feature (585)..(586): Xaa can be any naturally occurring amino acid
  misc_feature (588)..(588): Xaa can be any naturally occurring amino acid
  misc_feature (590)..(606): Xaa can be any naturally occurring amino acid
  misc_feature (609)..(609): Xaa can be any naturally occurring amino acid
  misc_feature (614)..(615): Xaa can be any naturally occurring amino acid
  misc_feature (618)..(618): Xaa can be any naturally occurring amino acid
  misc_feature (620)..(620): Xaa can be any naturally occurring amino acid
  misc_feature (622)..(623): Xaa can be any naturally occurring amino acid
  misc_feature (625)..(625): Xaa can be any naturally occurring amino acid
XXXXXXXXXXXXXXXXXXXXXXXXXXXXXXXXXXXXXXXXXXXXXXXXXXXXXXXXXXXXXXXXXXXXXXXXXXXXXXXXXXXXXXXXXXXXXXXXXXXXXXXXXXXXXXXXXXXXXXXXXXXXXXXXXXXXXXXXXXXXXXXXXXXXXXXXXXXXXXXXXXXXXXXXXXXXXXXXXXXXXXXXXXXXXXXXXXXXXXXXRXLXVLXXXXXXXXXXXXXXDWXXXFPXXXXXLESLXFXCXXXPXXFXXLEXLVXRSPXLXXLXXNXXVSXXXLXRLXXXXPXLXXLGTGXFXXXXXXXXXXXXXXXXXXXXXAXXXXXXXVXLSGFRXXXXXYLXXIXXXXXXLXXLXXSXXXXXXXXXXXXIXXCXXXXXXXXLDXXXDEGLXAXAXXCKXLXXLXXXPXXXXEXXXXXVSEVGXXAIXXGCRXLXSXLXFCQXMTNXAVXXXSXNCXXLXVFRLCIXGRXXPDXVTXXPMDEGFGAIVXNCXKLTRLXXSGXLTDXAFXYIGXYXKXXRTLSVAFAGDSDXXLXXXLXGCXXLXKLEIRDXPFGDXXLXSGXHXXXNMRFXWMSXCXXXXXXCXXXXXXLPXXVXEXXXXXXXXXXXXXXXXXLYXYRSLXXPRXDXPXXVXIL

SEQ ID NO: 24164 - protein, 100 aa, artificial
  consensus sequence
  misc_feature (2)..(3): Xaa can be any naturally occurring amino acid
  misc_feature (6)..(10): Xaa can be any naturally occurring amino acid
  misc_feature (15)..(20): Xaa can be any naturally occurring amino acid
  misc_feature (30)..(30): Xaa can be any naturally occurring amino acid
  misc_feature (32)..(32): Xaa can be any naturally occurring amino acid
  misc_feature (36)..(37): Xaa can be any naturally occurring amino acid
  misc_feature (41)..(41): Xaa can be any naturally occurring amino acid
  misc_feature (44)..(44): Xaa can be any naturally occurring amino acid
  misc_feature (46)..(46): Xaa can be any naturally occurring amino acid
  misc_feature (48)..(48): Xaa can be any naturally occurring amino acid
  misc_feature (51)..(51): Xaa can be any naturally occurring amino acid
  misc_feature (55)..(55): Xaa can be any naturally occurring amino acid
  misc_feature (57)..(57): Xaa can be any naturally occurring amino acid
  misc_feature (61)..(62): Xaa can be any naturally occurring amino acid
  misc_feature (64)..(66): Xaa can be any naturally occurring amino acid
  misc_feature (73)..(73): Xaa can be any naturally occurring amino acid
  misc_feature (75)..(75): Xaa can be any naturally occurring amino acid
  misc_feature (78)..(78): Xaa can be any naturally occurring amino acid
  misc_feature (81)..(81): Xaa can be any naturally occurring amino acid
  misc_feature (90)..(94): Xaa can be any naturally occurring amino acid
  misc_feature (98)..(98): Xaa can be any naturally occurring amino acid
MXXETXXXXXEESVXXXXXXGKHRILAELXRXEQEXXFLEXELXEXEXTDXVSTXCXELLXXIXXXPDPLLPXTXGPXNLXWDRWFEGPXXXXXCRCXIL

SEQ ID NO: 24165 - protein, 543 aa, artificial
  consensus sequence
  misc_feature (1)..(43): Xaa can be any naturally occurring amino acid
  misc_feature (45)..(51): Xaa can be any naturally occurring amino acid
  misc_feature (53)..(60): Xaa can be any naturally occurring amino acid
  misc_feature (62)..(95): Xaa can be any naturally occurring amino acid
  misc_feature (102)..(119): Xaa can be any naturally occurring amino acid
  misc_feature (121)..(135): Xaa can be any naturally occurring amino acid
  misc_feature (137)..(143): Xaa can be any naturally occurring amino acid
  misc_feature (150)..(151): Xaa can be any naturally occurring amino acid
  misc_feature (154)..(154): Xaa can be any naturally occurring amino acid
  misc_feature (166)..(168): Xaa can be any naturally occurring amino acid
  misc_feature (170)..(170): Xaa can be any naturally occurring amino acid
  misc_feature (174)..(175): Xaa can be any naturally occurring amino acid
  misc_feature (178)..(178): Xaa can be any naturally occurring amino acid
  misc_feature (181)..(196): Xaa can be any naturally occurring amino acid
  misc_feature (198)..(201): Xaa can be any naturally occurring amino acid
  misc_feature (206)..(206): Xaa can be any naturally occurring amino acid
  misc_feature (208)..(208): Xaa can be any naturally occurring amino acid
  misc_feature (211)..(216): Xaa can be any naturally occurring amino acid
  misc_feature (239)..(239): Xaa can be any naturally occurring amino acid
  misc_feature (248)..(248): Xaa can be any naturally occurring amino acid
  misc_feature (263)..(263): Xaa can be any naturally occurring amino acid
  misc_feature (265)..(415): Xaa can be any naturally occurring amino acid
  misc_feature (417)..(500): Xaa can be any naturally occurring amino acid
  misc_feature (502)..(543): Xaa can be any naturally occurring amino acid
XXXXXXXXXXXXXXXXXXXXXXXXXXXXXXXXXXXXXXXXXXXEXXXXXXXKXXXXXXXXSXXXXXXXXXXXXXXXXXXXXXXXXXXXXXXXXXXQMLSFSXXXXXXXXXXXXXXXXXXYXXXXXXXXXXXXXXXSXXXXXXXVRGPFTXXQWXELEHQALIYKYXXXNXPVPXXLLXPIXXXXXXXXXXXXXXXXLXXXXLGWGXFXLGXXXXXXDPEPGRCRRTDGKKWRCSRDAVXDQKYCERHXNRGRHRSRKPVEGQXGXXXXXXXXXXXXXXXXXXXXXXXXXXXXXXXXXXXXXXXXXXXXXXXXXXXXXXXXXXXXXXXXXXXXXXXXXXXXXXXXXXXXXXXXXXXXXXXXXXXXXXXXXXXXXXXXXXXXXXXXXXXXXXXXXXXXXXXXXXXXXXXXXXXXXXXSXXXXXXXXXXXXXXXXXXXXXXXXXXXXXXXXXXXXXXXXXXXXXXXXXXXXXXXXXXXXXXXXXXXXXXXXXXXXXXXXXXXXLXXXXXXXXXXXXXXXXXXXXXXXXXXXXXXXXXXXXXXXXXX

SEQ ID NO: 24166 - protein, 203 aa, artificial
  consensus sequence
  misc_feature (1)..(12): Xaa can be any naturally occurring amino acid
  misc_feature (15)..(26): Xaa can be any naturally occurring amino acid
  misc_feature (28)..(28): Xaa can be any naturally occurring amino acid
  misc_feature (30)..(30): Xaa can be any naturally occurring amino acid
  misc_feature (32)..(36): Xaa can be any naturally occurring amino acid
  misc_feature (38)..(42): Xaa can be any naturally occurring amino acid
  misc_feature (44)..(62): Xaa can be any naturally occurring amino acid
  misc_feature (64)..(72): Xaa can be any naturally occurring amino acid
  misc_feature (74)..(75): Xaa can be any naturally occurring amino acid
  misc_feature (77)..(78): Xaa can be any naturally occurring amino acid
  misc_feature (80)..(82): Xaa can be any naturally occurring amino acid
  misc_feature (84)..(90): Xaa can be any naturally occurring amino acid
  misc_feature (92)..(94): Xaa can be any naturally occurring amino acid
  misc_feature (96)..(97): Xaa can be any naturally occurring amino acid
  misc_feature (99)..(108): Xaa can be any naturally occurring amino acid
  misc_feature (110)..(110): Xaa can be any naturally occurring amino acid
  misc_feature (112)..(114): Xaa can be any naturally occurring amino acid
  misc_feature (116)..(116): Xaa can be any naturally occurring amino acid
  misc_feature (118)..(118): Xaa can be any naturally occurring amino acid
  misc_feature (121)..(121): Xaa can be any naturally occurring amino acid
  misc_feature (123)..(123): Xaa can be any naturally occurring amino acid
  misc_feature (125)..(129): Xaa can be any naturally occurring amino acid
  misc_feature (131)..(131): Xaa can be any naturally occurring amino acid
  misc_feature (137)..(137): Xaa can be any naturally occurring amino acid
  misc_feature (139)..(139): Xaa can be any naturally occurring amino acid
  misc_feature (141)..(141): Xaa can be any naturally occurring amino acid
  misc_feature (145)..(149): Xaa can be any naturally occurring amino acid
  misc_feature (151)..(151): Xaa can be any naturally occurring amino acid
  misc_feature (153)..(153): Xaa can be any naturally occurring amino acid
  misc_feature (156)..(156): Xaa can be any naturally occurring amino acid
  misc_feature (163)..(163): Xaa can be any naturally occurring amino acid
  misc_feature (165)..(168): Xaa can be any naturally occurring amino acid
  misc_feature (170)..(173): Xaa can be any naturally occurring amino acid
  misc_feature (175)..(176): Xaa can be any naturally occurring amino acid
  misc_feature (178)..(179): Xaa can be any naturally occurring amino acid
  misc_feature (181)..(184): Xaa can be any naturally occurring amino acid
  misc_feature (186)..(188): Xaa can be any naturally occurring amino acid
  misc_feature (190)..(190): Xaa can be any naturally occurring amino acid
  misc_feature (195)..(203): Xaa can be any naturally occurring amino acid
XXXXXXXXXXXXPGXXXXXXXXXXXXGXGXYXXXXXIXXXXXGXXXXXXXXXXXXXXXXXXXVXXXXXXXXXPXXGXXVXXXVXXXXXXXAXXXIXXVXXXXXXXXXXGXIXXXDXRXTEXDXVXXXXXFXPGDIVXAXVXSLGXXXXXYXLXTAXNELGVVXAXXXXGXXXXPXXWXXMXXXXTXXXEXRKVAXXXXXXXXX

SEQ ID NO: 24167 - protein, 352 aa, artificial
  consensus sequence
  misc_feature (1)..(71): Xaa can be any naturally occurring amino acid
  misc_feature (73)..(77): Xaa can be any naturally occurring amino acid
  misc_feature (79)..(96): Xaa can be any naturally occurring amino acid
  misc_feature (98)..(352): Xaa can be any naturally occurring amino acid
XXXXXXXXXXXXXXXXXXXXXXXXXXXXXXXXXXXXXXXXXXXXXXXXXXXXXXXXXXXXXXXXXXXXXXXPXXXXXFXXXXXXXXXXXXXXXXXXNXXXXXXXXXXXXXXXXXXXXXXXXXXXXXXXXXXXXXXXXXXXXXXXXXXXXXXXXXXXXXXXXXXXXXXXXXXXXXXXXXXXXXXXXXXXXXXXXXXXXXXXXXXXXXXXXXXXXXXXXXXXXXXXXXXXXXXXXXXXXXXXXXXXXXXXXXXXXXXXXXXXXXXXXXXXXXXXXXXXXXXXXXXXXXXXXXXXXXXXXXXXXXXXXXXXXXXXXXXXXXXXXXXXXXXXXXXXXXXXXXXXXXXXXXXXXXXX

SEQ ID NO: 24168 - protein, 203 aa, artificial
  consensus sequence
  misc_feature (5)..(5): Xaa can be any naturally occurring amino acid
  misc_feature (8)..(9): Xaa can be any naturally occurring amino acid
  misc_feature (12)..(12): Xaa can be any naturally occurring amino acid
  misc_feature (15)..(20): Xaa can be any naturally occurring amino acid
  misc_feature (22)..(26): Xaa can be any naturally occurring amino acid
  misc_feature (28)..(33): Xaa can be any naturally occurring amino acid
  misc_feature (35)..(35): Xaa can be any naturally occurring amino acid
  misc_feature (38)..(38): Xaa can be any naturally occurring amino acid
  misc_feature (42)..(42): Xaa can be any naturally occurring amino acid
  misc_feature (44)..(44): Xaa can be any naturally occurring amino acid
  misc_feature (46)..(46): Xaa can be any naturally occurring amino acid
  misc_feature (48)..(56): Xaa can be any naturally occurring amino acid
  misc_feature (59)..(59): Xaa can be any naturally occurring amino acid
  misc_feature (61)..(62): Xaa can be any naturally occurring amino acid
  misc_feature (65)..(65): Xaa can be any naturally occurring amino acid
  misc_feature (68)..(70): Xaa can be any naturally occurring amino acid
  misc_feature (72)..(73): Xaa can be any naturally occurring amino acid
  misc_feature (75)..(79): Xaa can be any naturally occurring amino acid
  misc_feature (83)..(85): Xaa can be any naturally occurring amino acid
  misc_feature (87)..(90): Xaa can be any naturally occurring amino acid
  misc_feature (92)..(93): Xaa can be any naturally occurring amino acid
  misc_feature (96)..(96): Xaa can be any naturally occurring amino acid
  misc_feature (100)..(100): Xaa can be any naturally occurring amino acid
  misc_feature (102)..(103): Xaa can be any naturally occurring amino acid
  misc_feature (106)..(106): Xaa can be any naturally occurring amino acid
  misc_feature (109)..(109): Xaa can be any naturally occurring amino acid
  misc_feature (117)..(117): Xaa can be any naturally occurring amino acid
  misc_feature (119)..(119): Xaa can be any naturally occurring amino acid
  misc_feature (121)..(146): Xaa can be any naturally occurring amino acid
  misc_feature (148)..(157): Xaa can be any naturally occurring amino acid
  misc_feature (161)..(161): Xaa can be any naturally occurring amino acid
  misc_feature (163)..(163): Xaa can be any naturally occurring amino acid
  misc_feature (168)..(173): Xaa can be any naturally occurring amino acid
  misc_feature (175)..(175): Xaa can be any naturally occurring amino acid
  misc_feature (177)..(177): Xaa can be any naturally occurring amino acid
  misc_feature (180)..(180): Xaa can be any naturally occurring amino acid
  misc_feature (182)..(186): Xaa can be any naturally occurring amino acid
  misc_feature (189)..(189): Xaa can be any naturally occurring amino acid
  misc_feature (191)..(192): Xaa can be any naturally occurring amino acid
  misc_feature (195)..(195): Xaa can be any naturally occurring amino acid
  misc_feature (197)..(197): Xaa can be any naturally occurring amino acid
  misc_feature (199)..(199): Xaa can be any naturally occurring amino acid
  misc_feature (201)..(201): Xaa can be any naturally occurring amino acid
MSTVXSCXXLSXRPXXXXXXSXXXXXPXXXXXXAXERXSRPXSXCXAXXXXXXXXXPKXDXXPFXISXXXLXXPXXXXXERWXXXEXXXXVXXWFXVPGXSXXDLXVEXDEDVLVIXKXKXXXXXXXXXXXXXXXXXXXXXXXXXXAXXXXXXXXXXYARXLXPAGYXXXXXXAXLXSGXLXXXXXKVXEXXRRXIXVXIXVK

SEQ ID NO: 24169 - protein, 550 aa, artificial
  consensus sequence
  misc_feature (1)..(58): Xaa can be any naturally occurring amino acid
  misc_feature (60)..(72): Xaa can be any naturally occurring amino acid
  misc_feature (74)..(78): Xaa can be any naturally occurring amino acid
  misc_feature (80)..(88): Xaa can be any naturally occurring amino acid
  misc_feature (90)..(92): Xaa can be any naturally occurring amino acid
  misc_feature (94)..(95): Xaa can be any naturally occurring amino acid
  misc_feature (97)..(99): Xaa can be any naturally occurring amino acid
  misc_feature (102)..(103): Xaa can be any naturally occurring amino acid
  misc_feature (105)..(106): Xaa can be any naturally occurring amino acid
  misc_feature (109)..(114): Xaa can be any naturally occurring amino acid
  misc_feature (120)..(170): Xaa can be any naturally occurring amino acid
  misc_feature (172)..(179): Xaa can be any naturally occurring amino acid
  misc_feature (181)..(182): Xaa can be any naturally occurring amino acid
  misc_feature (184)..(186): Xaa can be any naturally occurring amino acid
  misc_feature (188)..(264): Xaa can be any naturally occurring amino acid
  misc_feature (266)..(337): Xaa can be any naturally occurring amino acid
  misc_feature (339)..(351): Xaa can be any naturally occurring amino acid
  misc_feature (353)..(362): Xaa can be any naturally occurring amino acid
  misc_feature (364)..(455): Xaa can be any naturally occurring amino acid
  misc_feature (457)..(465): Xaa can be any naturally occurring amino acid
  misc_feature (467)..(481): Xaa can be any naturally occurring amino acid
  misc_feature (483)..(495): Xaa can be any naturally occurring amino acid
  misc_feature (497)..(550): Xaa can be any naturally occurring amino acid
XXXXXXXXXXXXXXXXXXXXXXXXXXXXXXXXXXXXXXXXXXXXXXXXXXXXXXXXXXGXXXXXXXXXXXXXPXXXXXGXXXXXXXXXWXXXPXXGXXXQPXXGXXSDXXXXXXGRRRPXXXXXXXXXXXXXXXXXXXXXXXXXXXXXXXXXXXXXXXXXXXXXXXXXXXDXXXXXXXXPXXAXXXDXXXXXXXXXXXXXXXXXXXXXXXXXXXXXXXXXXXXXXXXXXXXXXXXXXXXXXXXXXXXXXXXXXXXXXXXXXXXXEXXXXXXXXXXXXXXXXXXXXXXXXXXXXXXXXXXXXXXXXXXXXXXXXXXXXXXXXXXXXXXXXXXXXXXXXPXXXXXXXXXXXXXWXXXXXXXXXXTXXXXXXXXXXXXXXXXXXXXXXXXXXXXXXXXXXXXXXXXXXXXXXXXXXXXXXXXXXXXXXXXXXXXXXXXXXXXXXXXXXXXXXXXXXXXGXXXXXXXXXPXXXXXXXXXXXXXXXGXXXXXXXXXXXXXQXXXXXXXXXXXXXXXXXXXXXXXXXXXXXXXXXXXXXXXXXXXXXXXXXXXXXX

SEQ ID NO: 24170 - protein, 567 aa, artificial
  consensus sequence
  misc_feature (1)..(2): Xaa can be any naturally occurring amino acid
  misc_feature (4)..(5): Xaa can be any naturally occurring amino acid
  misc_feature (7)..(13): Xaa can be any naturally occurring amino acid
  misc_feature (15)..(26): Xaa can be any naturally occurring amino acid
  misc_feature (28)..(30): Xaa can be any naturally occurring amino acid
  misc_feature (32)..(34): Xaa can be any naturally occurring amino acid
  misc_feature (36)..(37): Xaa can be any naturally occurring amino acid
  misc_feature (39)..(40): Xaa can be any naturally occurring amino acid
  misc_feature (43)..(44): Xaa can be any naturally occurring amino acid
  misc_feature (47)..(49): Xaa can be any naturally occurring amino acid
  misc_feature (51)..(51): Xaa can be any naturally occurring amino acid
  misc_feature (55)..(55): Xaa can be any naturally occurring amino acid
  misc_feature (59)..(61): Xaa can be any naturally occurring amino acid
  misc_feature (63)..(63): Xaa can be any naturally occurring amino acid
  misc_feature (68)..(68): Xaa can be any naturally occurring amino acid
  misc_feature (70)..(71): Xaa can be any naturally occurring amino acid
  misc_feature (73)..(75): Xaa can be any naturally occurring amino acid
  misc_feature (77)..(77): Xaa can be any naturally occurring amino acid
  misc_feature (79)..(81): Xaa can be any naturally occurring amino acid
  misc_feature (87)..(120): Xaa can be any naturally occurring amino acid
  misc_feature (123)..(125): Xaa can be any naturally occurring amino acid
  misc_feature (127)..(127): Xaa can be any naturally occurring amino acid
  misc_feature (130)..(130): Xaa can be any naturally occurring amino acid
  misc_feature (132)..(134): Xaa can be any naturally occurring amino acid
  misc_feature (136)..(136): Xaa can be any naturally occurring amino acid
  misc_feature (138)..(138): Xaa can be any naturally occurring amino acid
  misc_feature (140)..(145): Xaa can be any naturally occurring amino acid
  misc_feature (147)..(147): Xaa can be any naturally occurring amino acid
  misc_feature (149)..(149): Xaa can be any naturally occurring amino acid
  misc_feature (153)..(153): Xaa can be any naturally occurring amino acid
  misc_feature (156)..(156): Xaa can be any naturally occurring amino acid
  misc_feature (158)..(166): Xaa can be any naturally occurring amino acid
  misc_feature (169)..(169): Xaa can be any naturally occurring amino acid
  misc_feature (173)..(173): Xaa can be any naturally occurring amino acid
  misc_feature (176)..(183): Xaa can be any naturally occurring amino acid
  misc_feature (187)..(187): Xaa can be any naturally occurring amino acid
  misc_feature (191)..(197): Xaa can be any naturally occurring amino acid
  misc_feature (199)..(201): Xaa can be any naturally occurring amino acid
  misc_feature (203)..(205): Xaa can be any naturally occurring amino acid
  misc_feature (210)..(210): Xaa can be any naturally occurring amino acid
  misc_feature (212)..(213): Xaa can be any naturally occurring amino acid
  misc_feature (215)..(221): Xaa can be any naturally occurring amino acid
  misc_feature (223)..(238): Xaa can be any naturally occurring amino acid
  misc_feature (243)..(243): Xaa can be any naturally occurring amino acid
  misc_feature (247)..(247): Xaa can be any naturally occurring amino acid
  misc_feature (256)..(256): Xaa can be any naturally occurring amino acid
  misc_feature (258)..(259): Xaa can be any naturally occurring amino acid
  misc_feature (264)..(264): Xaa can be any naturally occurring amino acid
  misc_feature (266)..(266): Xaa can be any naturally occurring amino acid
  misc_feature (270)..(270): Xaa can be any naturally occurring amino acid
  misc_feature (278)..(279): Xaa can be any naturally occurring amino acid
  misc_feature (281)..(281): Xaa can be any naturally occurring amino acid
  misc_feature (301)..(302): Xaa can be any naturally occurring amino acid
  misc_feature (305)..(305): Xaa can be any naturally occurring amino acid
  misc_feature (307)..(307): Xaa can be any naturally occurring amino acid
  misc_feature (313)..(313): Xaa can be any naturally occurring amino acid
  misc_feature (317)..(318): Xaa can be any naturally occurring amino acid
  misc_feature (322)..(322): Xaa can be any naturally occurring amino acid
  misc_feature (331)..(332): Xaa can be any naturally occurring amino acid
  misc_feature (336)..(336): Xaa can be any naturally occurring amino acid
  misc_feature (338)..(339): Xaa can be any naturally occurring amino acid
  misc_feature (343)..(343): Xaa can be any naturally occurring amino acid
  misc_feature (347)..(347): Xaa can be any naturally occurring amino acid
  misc_feature (349)..(349): Xaa can be any naturally occurring amino acid
  misc_feature (353)..(353): Xaa can be any naturally occurring amino acid
  misc_feature (355)..(356): Xaa can be any naturally occurring amino acid
  misc_feature (358)..(359): Xaa can be any naturally occurring amino acid
  misc_feature (362)..(363): Xaa can be any naturally occurring amino acid
  misc_feature (368)..(368): Xaa can be any naturally occurring amino acid
  misc_feature (370)..(370): Xaa can be any naturally occurring amino acid
  misc_feature (383)..(383): Xaa can be any naturally occurring amino acid
  misc_feature (391)..(391): Xaa can be any naturally occurring amino acid
  misc_feature (400)..(403): Xaa can be any naturally occurring amino acid
  misc_feature (407)..(408): Xaa can be any naturally occurring amino acid
  misc_feature (413)..(413): Xaa can be any naturally occurring amino acid
  misc_feature (417)..(417): Xaa can be any naturally occurring amino acid
  misc_feature (423)..(423): Xaa can be any naturally occurring amino acid
  misc_feature (426)..(427): Xaa can be any naturally occurring amino acid
  misc_feature (430)..(430): Xaa can be any naturally occurring amino acid
  misc_feature (442)..(442): Xaa can be any naturally occurring amino acid
  misc_feature (445)..(445): Xaa can be any naturally occurring amino acid
  misc_feature (452)..(452): Xaa can be any naturally occurring amino acid
  misc_feature (458)..(458): Xaa can be any naturally occurring amino acid
  misc_feature (461)..(461): Xaa can be any naturally occurring amino acid
  misc_feature (464)..(464): Xaa can be any naturally occurring amino acid
  misc_feature (468)..(469): Xaa can be any naturally occurring amino acid
  misc_feature (472)..(472): Xaa can be any naturally occurring amino acid
  misc_feature (482)..(482): Xaa can be any naturally occurring amino acid
  misc_feature (486)..(486): Xaa can be any naturally occurring amino acid
  misc_feature (490)..(490): Xaa can be any naturally occurring amino acid
  misc_feature (493)..(493): Xaa can be any naturally occurring amino acid
  misc_feature (502)..(502): Xaa can be any naturally occurring amino acid
  misc_feature (512)..(512): Xaa can be any naturally occurring amino acid
  misc_feature (515)..(516): Xaa can be any naturally occurring amino acid
  misc_feature (518)..(518): Xaa can be any naturally occurring amino acid
  misc_feature (521)..(521): Xaa can be any naturally occurring amino acid
  misc_feature (531)..(532): Xaa can be any naturally occurring amino acid
  misc_feature (543)..(545): Xaa can be any naturally occurring amino acid
  misc_feature (549)..(549): Xaa can be any naturally occurring amino acid
  misc_feature (553)..(553): Xaa can be any naturally occurring amino acid
  misc_feature (557)..(557): Xaa can be any naturally occurring amino acid
  misc_feature (559)..(559): Xaa can be any naturally occurring amino acid
  misc_feature (563)..(567): Xaa can be any naturally occurring amino acid
XXGXXAXXXXXXXRXXXXXXXXXXXXGXXXFXXXVXXVXXFTXXAAXXXPXDPLXHPSXXXTXFLTSXSXXTXXXDXSXXXTGEDFXXXXXXXXXXXXXXXXXXXXXXXXXXXXXXXXXXCDXXXPXDCXDXXXFXLXMXXXXXXFXDXHFYXFGXPXXXXXXXXXCDXAWRXRPXXXXXXXXYKDXRRFXXXXXXXCXXXVXXXGEYHXGXXAXXXXXXXGXXXXXXXXXXXXXXXXVVGEXVNDXLPVVESESXFXXGKYLXYXGGGXRCKSMNHXXWXFLCALGEAQYLNRTLVMDLXXCLXSXYTSSGXDEEXXDFRXYFDFEHLKXXASVXDXXQFWXDWGXWXKKDXLXXHXXEDXXVTPMXLXDVKDTLIMRKFGXVEPDNYWXRVCEGETEXXXXRPWXXLWKSXRLMXIVSAIXSRXXWDXDSVHVVRGEKAXNKXLWPNLDXDTSPDXLLXTLXDKVXXGRXLYIATNEPDXSFFXPLKXKYXTHFLDDFKXLWDENSEWYXETXXLXNGXPVEFDGYMRXXVDTEVFLRGKXXXETFXDLTXDCKXGXNTCXXXXX

SEQ ID NO: 24171 - protein, 484 aa, artificial
  consensus sequence
  misc_feature (1)..(18): Xaa can be any naturally occurring amino acid
  misc_feature (20)..(21): Xaa can be any naturally occurring amino acid
  misc_feature (23)..(24): Xaa can be any naturally occurring amino acid
  misc_feature (30)..(30): Xaa can be any naturally occurring amino acid
  misc_feature (32)..(34): Xaa can be any naturally occurring amino acid
  misc_feature (36)..(37): Xaa can be any naturally occurring amino acid
  misc_feature (43)..(44): Xaa can be any naturally occurring amino acid
  misc_feature (47)..(51): Xaa can be any naturally occurring amino acid
  misc_feature (53)..(54): Xaa can be any naturally occurring amino acid
  misc_feature (56)..(57): Xaa can be any naturally occurring amino acid
  misc_feature (59)..(60): Xaa can be any naturally occurring amino acid
  misc_feature (64)..(64): Xaa can be any naturally occurring amino acid
  misc_feature (66)..(66): Xaa can be any naturally occurring amino acid
  misc_feature (68)..(68): Xaa can be any naturally occurring amino acid
  misc_feature (71)..(74): Xaa can be any naturally occurring amino acid
  misc_feature (76)..(79): Xaa can be any naturally occurring amino acid
  misc_feature (81)..(81): Xaa can be any naturally occurring amino acid
  misc_feature (88)..(88): Xaa can be any naturally occurring amino acid
  misc_feature (92)..(93): Xaa can be any naturally occurring amino acid
  misc_feature (97)..(99): Xaa can be any naturally occurring amino acid
  misc_feature (101)..(101): Xaa can be any naturally occurring amino acid
  misc_feature (103)..(105): Xaa can be any naturally occurring amino acid
  misc_feature (107)..(107): Xaa can be any naturally occurring amino acid
  misc_feature (109)..(111): Xaa can be any naturally occurring amino acid
  misc_feature (114)..(116): Xaa can be any naturally occurring amino acid
  misc_feature (119)..(120): Xaa can be any naturally occurring amino acid
  misc_feature (123)..(124): Xaa can be any naturally occurring amino acid
  misc_feature (128)..(129): Xaa can be any naturally occurring amino acid
  misc_feature (132)..(132): Xaa can be any naturally occurring amino acid
  misc_feature (134)..(136): Xaa can be any naturally occurring amino acid
  misc_feature (138)..(143): Xaa can be any naturally occurring amino acid
  misc_feature (145)..(150): Xaa can be any naturally occurring amino acid
  misc_feature (152)..(166): Xaa can be any naturally occurring amino acid
  misc_feature (168)..(169): Xaa can be any naturally occurring amino acid
  misc_feature (171)..(176): Xaa can be any naturally occurring amino acid
  misc_feature (178)..(181): Xaa can be any naturally occurring amino acid
  misc_feature (184)..(186): Xaa can be any naturally occurring amino acid
  misc_feature (188)..(188): Xaa can be any naturally occurring amino acid
  misc_feature (190)..(195): Xaa can be any naturally occurring amino acid
  misc_feature (197)..(198): Xaa can be any naturally occurring amino acid
  misc_feature (201)..(208): Xaa can be any naturally occurring amino acid
  misc_feature (210)..(215): Xaa can be any naturally occurring amino acid
  misc_feature (219)..(219): Xaa can be any naturally occurring amino acid
  misc_feature (222)..(222): Xaa can be any naturally occurring amino acid
  misc_feature (225)..(227): Xaa can be any naturally occurring amino acid
  misc_feature (229)..(230): Xaa can be any naturally occurring amino acid
  misc_feature (236)..(238): Xaa can be any naturally occurring amino acid
  misc_feature (240)..(243): Xaa can be any naturally occurring amino acid
  misc_feature (245)..(246): Xaa can be any naturally occurring amino acid
  misc_feature (249)..(249): Xaa can be any naturally occurring amino acid
  misc_feature (251)..(251): Xaa can be any naturally occurring amino acid
  misc_feature (253)..(254): Xaa can be any naturally occurring amino acid
  misc_feature (256)..(257): Xaa can be any naturally occurring amino acid
  misc_feature (259)..(275): Xaa can be any naturally occurring amino acid
  misc_feature (277)..(279): Xaa can be any naturally occurring amino acid
  misc_feature (288)..(288): Xaa can be any naturally occurring amino acid
  misc_feature (293)..(294): Xaa can be any naturally occurring amino acid
  misc_feature (298)..(299): Xaa can be any naturally occurring amino acid
  misc_feature (303)..(303): Xaa can be any naturally occurring amino acid
  misc_feature (305)..(318): Xaa can be any naturally occurring amino acid
  misc_feature (321)..(321): Xaa can be any naturally occurring amino acid
  misc_feature (325)..(335): Xaa can be any naturally occurring amino acid
  misc_feature (337)..(341): Xaa can be any naturally occurring amino acid
  misc_feature (345)..(346): Xaa can be any naturally occurring amino acid
  misc_feature (348)..(348): Xaa can be any naturally occurring amino acid
  misc_feature (352)..(352): Xaa can be any naturally occurring amino acid
  misc_feature (355)..(356): Xaa can be any naturally occurring amino acid
  misc_feature (361)..(361): Xaa can be any naturally occurring amino acid
  misc_feature (363)..(364): Xaa can be any naturally occurring amino acid
  misc_feature (368)..(368): Xaa can be any naturally occurring amino acid
  misc_feature (371)..(373): Xaa can be any naturally occurring amino acid
  misc_feature (377)..(381): Xaa can be any naturally occurring amino acid
  misc_feature (386)..(386): Xaa can be any naturally occurring amino acid
  misc_feature (394)..(394): Xaa can be any naturally occurring amino acid
  misc_feature (396)..(396): Xaa can be any naturally occurring amino acid
  misc_feature (399)..(399): Xaa can be any naturally occurring amino acid
  misc_feature (403)..(403): Xaa can be any naturally occurring amino acid
  misc_feature (405)..(406): Xaa can be any naturally occurring amino acid
  misc_feature (408)..(410): Xaa can be any naturally occurring amino acid
  misc_feature (413)..(416): Xaa can be any naturally occurring amino acid
  misc_feature (418)..(419): Xaa can be any naturally occurring amino acid
  misc_feature (422)..(422): Xaa can be any naturally occurring amino acid
  misc_feature (424)..(425): Xaa can be any naturally occurring amino acid
  misc_feature (431)..(431): Xaa can be any naturally occurring amino acid
  misc_feature (434)..(434): Xaa can be any naturally occurring amino acid
  misc_feature (436)..(438): Xaa can be any naturally occurring amino acid
  misc_feature (444)..(444): Xaa can be any naturally occurring amino acid
  misc_feature (446)..(447): Xaa can be any naturally occurring amino acid
  misc_feature (449)..(449): Xaa can be any naturally occurring amino acid
  misc_feature (453)..(453): Xaa can be any naturally occurring amino acid
  misc_feature (455)..(455): Xaa can be any naturally occurring amino acid
  misc_feature (458)..(459): Xaa can be any naturally occurring amino acid
  misc_feature (461)..(462): Xaa can be any naturally occurring amino acid
  misc_feature (465)..(473): Xaa can be any naturally occurring amino acid
  misc_feature (475)..(477): Xaa can be any naturally occurring amino acid
  misc_feature (480)..(484): Xaa can be any naturally occurring amino acid
XXXXXXXXXXXXXXXXXXLXXRXXPGSYGXPXXXPXXDRLDYXXFQXXXXXFXXRXXKXXSTVXRXNXPPXXXXFXXXXPXVVAVLDXKSFXXLFDXXXVXKXXXLXGXXXPSXXXTGXXRVXXYLDXXEPXHXXXKXXXXXXLXXXXXXWXXXXXXXXXXXXXXXEXXLXXXXXXSXXXXLQXXXFXFXXXXXXGXXPSXXXXXXXXGXXXXXXWLAXQLXPTXXXGXXQPLEEXXXHXXXXPXXLVXGXYXXLXXFXXXXXXXXXXXXXXXXXLXXXEAIHNLLFXLGFNXXGGFXXFLPXLXXXXXXXXXXXXXXLRXEVRXXXXXXXXXXXFXXXXXMELXXSXVYEXLRXXPPVPXQXXRARXDFXXXSHDXXXXXKKGEXLCGYQPLXMXDPXVFDXPXXFXXXRFXXXXGXXLLXYXXWSNGPXTGXPXXXNKQCAXKXXVXLTAXLXVAXXFXXYDXXXXXXXXXTXXXKAXXXXX

SEQ ID NO: 24172 - protein, 367 aa, artificial
  consensus sequence
  misc_feature (1)..(20): Xaa can be any naturally occurring amino acid
  misc_feature (22)..(23): Xaa can be any naturally occurring amino acid
  misc_feature (28)..(34): Xaa can be any naturally occurring amino acid
  misc_feature (37)..(67): Xaa can be any naturally occurring amino acid
  misc_feature (71)..(72): Xaa can be any naturally occurring amino acid
  misc_feature (74)..(74): Xaa can be any naturally occurring amino acid
  misc_feature (79)..(79): Xaa can be any naturally occurring amino acid
  misc_feature (81)..(83): Xaa can be any naturally occurring amino acid
  misc_feature (85)..(88): Xaa can be any naturally occurring amino acid
  misc_feature (90)..(107): Xaa can be any naturally occurring amino acid
  misc_feature (109)..(112): Xaa can be any naturally occurring amino acid
  misc_feature (114)..(117): Xaa can be any naturally occurring amino acid
  misc_feature (120)..(172): Xaa can be any naturally occurring amino acid
  misc_feature (174)..(233): Xaa can be any naturally occurring amino acid
  misc_feature (235)..(235): Xaa can be any naturally occurring amino acid
  misc_feature (237)..(242): Xaa can be any naturally occurring amino acid
  misc_feature (245)..(255): Xaa can be any naturally occurring amino acid
  misc_feature (258)..(260): Xaa can be any naturally occurring amino acid
  misc_feature (262)..(267): Xaa can be any naturally occurring amino acid
  misc_feature (270)..(270): Xaa can be any naturally occurring amino acid
  misc_feature (272)..(273): Xaa can be any naturally occurring amino acid
  misc_feature (275)..(275): Xaa can be any naturally occurring amino acid
  misc_feature (277)..(279): Xaa can be any naturally occurring amino acid
  misc_feature (281)..(284): Xaa can be any naturally occurring amino acid
  misc_feature (286)..(288): Xaa can be any naturally occurring amino acid
  misc_feature (290)..(290): Xaa can be any naturally occurring amino acid
  misc_feature (292)..(294): Xaa can be any naturally occurring amino acid
  misc_feature (297)..(299): Xaa can be any naturally occurring amino acid
  misc_feature (301)..(306): Xaa can be any naturally occurring amino acid
  misc_feature (308)..(311): Xaa can be any naturally occurring amino acid
  misc_feature (313)..(319): Xaa can be any naturally occurring amino acid
  misc_feature (321)..(329): Xaa can be any naturally occurring amino acid
  misc_feature (331)..(341): Xaa can be any naturally occurring amino acid
  misc_feature (343)..(347): Xaa can be any naturally occurring amino acid
  misc_feature (349)..(355): Xaa can be any naturally occurring amino acid
  misc_feature (357)..(359): Xaa can be any naturally occurring amino acid
  misc_feature (362)..(362): Xaa can be any naturally occurring amino acid
  misc_feature (364)..(367): Xaa can be any naturally occurring amino acid
XXXXXXXXXXXXXXXXXXXXNXXNWHWXXXXXXXWSXXXXXXXXXXXXXXXXXXXXXXXXXXXXXXXGEAXXNXRKGKXIXXXEXXXXLXXXXXXXXXXXXXXXXXXGXXXXPXXXXENXXXXXXXXXXXXXXXXXXXXXXXXXXXXXXXXXXXXXXXXXXXXXXXXXXXXXLXXXXXXXXXXXXXXXXXXXXXXXXXXXXXXXXXXXXXXXXXXXXXXXXXXXXXXXXXXXXEXFXXXXXXLYXXXXXXXXXXXFTXXXAXXXXXXGGXFXXFXGXXXGXXXXLXXXKXIXXXWRXXXWXXXXXXTXXXXFXXXXXXXTXXXXXXXXXPXXXXXXXXXXXEXXXXXWXXXXXXXIXXXFGXGXXXX

SEQ ID NO: 24173 - protein, 248 aa, artificial
  consensus sequence
  misc_feature (1)..(147): Xaa can be any naturally occurring amino acid
  misc_feature (149)..(173): Xaa can be any naturally occurring amino acid
  misc_feature (175)..(175): Xaa can be any naturally occurring amino acid
  misc_feature (177)..(177): Xaa can be any naturally occurring amino acid
  misc_feature (179)..(180): Xaa can be any naturally occurring amino acid
  misc_feature (184)..(185): Xaa can be any naturally occurring amino acid
  misc_feature (195)..(196): Xaa can be any naturally occurring amino acid
  misc_feature (198)..(241): Xaa can be any naturally occurring amino acid
  misc_feature (243)..(248): Xaa can be any naturally occurring amino acid
XXXXXXXXXXXXXXXXXXXXXXXXXXXXXXXXXXXXXXXXXXXXXXXXXXXXXXXXXXXXXXXXXXXXXXXXXXXXXXXXXXXXXXXXXXXXXXXXXXXXXXXXXXXXXXXXXXXXXXXXXXXXXXXXXXXXXXXXXXXXXXXXXXXRXXXXXXXXXXXXXXXXXXXXXXXXXDXLXLXXQDPXXRLLLHGVCEXXNXXXXXXXXXXXXXXXXXXXXXXXXXXXXXXXXXXXXXXXXXXXXKXXXXXX

SEQ ID NO: 24174 - protein, 464 aa, artificial
  consensus sequence
  misc_feature (1)..(290): Xaa can be any naturally occurring amino acid
  misc_feature (292)..(292): Xaa can be any naturally occurring amino acid
  misc_feature (294)..(309): Xaa can be any naturally occurring amino acid
  misc_feature (312)..(312): Xaa can be any naturally occurring amino acid
  misc_feature (314)..(315): Xaa can be any naturally occurring amino acid
  misc_feature (317)..(319): Xaa can be any naturally occurring amino acid
  misc_feature (321)..(321): Xaa can be any naturally occurring amino acid
  misc_feature (323)..(326): Xaa can be any naturally occurring amino acid
  misc_feature (329)..(335): Xaa can be any naturally occurring amino acid
  misc_feature (338)..(341): Xaa can be any naturally occurring amino acid
  misc_feature (344)..(351): Xaa can be any naturally occurring amino acid
  misc_feature (353)..(356): Xaa can be any naturally occurring amino acid
  misc_feature (358)..(358): Xaa can be any naturally occurring amino acid
  misc_feature (360)..(360): Xaa can be any naturally occurring amino acid
  misc_feature (363)..(373): Xaa can be any naturally occurring amino acid
  misc_feature (375)..(376): Xaa can be any naturally occurring amino acid
  misc_feature (378)..(396): Xaa can be any naturally occurring amino acid
  misc_feature (398)..(398): Xaa can be any naturally occurring amino acid
  misc_feature (400)..(400): Xaa can be any naturally occurring amino acid
  misc_feature (402)..(403): Xaa can be any naturally occurring amino acid
  misc_feature (406)..(417): Xaa can be any naturally occurring amino acid
  misc_feature (419)..(464): Xaa can be any naturally occurring amino acid
XXXXXXXXXXXXXXXXXXXXXXXXXXXXXXXXXXXXXXXXXXXXXXXXXXXXXXXXXXXXXXXXXXXXXXXXXXXXXXXXXXXXXXXXXXXXXXXXXXXXXXXXXXXXXXXXXXXXXXXXXXXXXXXXXXXXXXXXXXXXXXXXXXXXXXXXXXXXXXXXXXXXXXXXXXXXXXXXXXXXXXXXXXXXXXXXXXXXXXXXXXXXXXXXXXXXXXXXXXXXXXXXXXXXXXXXXXXXXXXXXXXXXXXXXXXXXXXXXXXXXXXXXXXXXXXXXXXXXXXXXXXXXXXXXXWXGXXXXXXXXXXXXXXXXAHXSXXAXXXVXEXXXXLPXXXXXXXLPXXXXWPXXXXXXXXPXXXXIXLXFFXXXXXXXXXXXDXXVXXXXXXXXXXXXXXXXXXXLXFXSXXLPXXXXXXXXXXXXWXXXXXXXXXXXXXXXXXXXXXXXXXXXXXXXXXXXXXXXXXXXXXX
